United States Patent Application Publication US 2025/0051766 A1 - sequence listing, part 15

SEQ ID NO: 5065 - DNA, 58617616 bp, Homo sapiens (residues 28,223,300-30,394,322 of 58,617,616)
  source 1..58617616: mol_type = genomic DNA
cttgctctaccacccctctgcaggcaagcagcatcaggcaaggtggggctttctcctctcttgttctggactctctgtgtttgtcagttcagccaaaagttccccttaactacctcaaaatcatttcagatcttgataaaattgaacaggagtctgccattgaacccttgtcagtaagaacaaaaactgtagcagcagctgcgtgtctctttcctgagaaccgaatagggactcctttgggtgctgttttcagataatacagcttcttcaatgtgacacacaggagtcccacccggtagcaggggtgcattttgagttctttgacagtactgttatcagatcttggtcaccatcctagaccaagatacccacattctgaaggcattggggtatcagagaaactccttacagtttccgagtttgaggccatttttcttcctcttcactaataaatacacgaagattgggatttgtgtgtgttgagctcattttaataacaggcaacaataactgtcctgtttggcctcagcaaaaagtccagaaagatgctagagtattccatgagtatgatacagaggtgaaaggagatacgcaagaatctccttttcaaggtttacattctggagtatcccaggtcacgttttctaacagcaagcctgagacagggattcttgtataagtaatcatttgagagatgctctcaggtgagtttgctagaaaatgagggaaggagaagcagccgcgtgctatcagcagaagtctcttttccacccgattctatgggttctctggagcgtgaatttcaccacagacatgagcaaggtccatccttgtaaggggagaaaagaggggcagtgcctaaccctcagacatcaacagcagataactattctcctaaaaaggtgcaggtgtgagccattttcagctgacacccacagcaggcgagaagtggttgcactggccagataaaaggctcctgggtggggtaccaacagtggctactgtagggggagacctgtccctgagctaaggcagagggaggagcagagtcctgcagcacagccatggccacttgggcctcccagtgtgtaccagggcttctgcatccctccaacatccattcaatactcattaatgcacctgtgctatgtaccaagcactgtgccagactctggggacacagcactgttggcgccagacgtggttcctgcgcccacgcagcctacatctcacagaagtgaaaatcattgagcatggacaacgccggcaggaacttcaaggcatggcagtggagcatcatggctaggagcatggactctggactcttggttccttgtgggtcagccatgtgacctcgggtgagtgactcatcctttttaagcttttgtttcatcgtggagaagaaaatggcccccacttacttttaagatttggcgtatgcgtgaagattaaaccagataatgcatgtgaggtacttagctcaagacctggcccagagctgcttcctagtaatgtgaaataattataataataatgttatcattgttgttataacattggttacaaccattcaggaagatggtttctcaatgactgttctctttgtatttctttgtgcactgaatcatgccctgtggcgggcactgtgctgggcctgaggtcatggtggagggcataggcagtgacactctggctcagtgtcctgggggaggtgtctgactcctccccatctccttaaattcacttcatctttgcaccagccagctctcctttcctcaccagggctattatcaaattttgaaaatttctagcagttttccttaaatattaatttcattttttgctttttcttttttttcaacttttattttagaatcagggagtacatgtgcataattgttacagaagtgttaacatattgcataatgctgatatttgaggtatgatggaacccttcacccaggtagtgagcatagtacccaacaggaagttttccagcccttctccctccatccctccttctcccttttcatagtccccagtgtctactgttgccatctttatatccatgtgtccgcagtgtttagctcccacttacagttgagagcatgcagtatttgactttctgttcctgcattaattcacttaagattatggcctctaattatattcacgttgctgcaaaggtcatgattttgttcttatttatggctgcatcatatttcatggtgtgtatgtaccacattttctttaatccaccattgataggcatctgggttgggtccatgcatttgctattgtgactagtgctgtgatgaagatatgggtgcatgtgtccttttggttgaatgatttattctactgtggttatatgcccagtaatgaggttgctgggtcgaatgatagttcaacttttagttctttgagaaatctccaaagtgccttccactgtggctggactaatttacattcccactcatggtgcataagtgtctgcttttctctaacaaaagccattctgattggtgtgagttggtgtctcactgtagtttcgatttgcatttctcagatgattagtgatcatgagcatttttcatatgttttaagcattaattttaatttctgagaacaaggctggaatattcatctcaagaatagctgatccaatccagtgtgtcataaacatggaggcagagataggcactatatgtttctaagcaggtctgaaactctgctcagagactgcgctggacaggtctcccagatcttcaaaaagtatctgtggttcctcccctcttcacacacagacaaacacacatacacaaacccaagataacattttttcctccaatacccagggagctctgaccgcaggtttggctgcccagtgcttatgaaccatgtctccgatgattttataatctcctccattaactgcactaacattttaatgagtcttggcatcaagtagttatctgcagattttctggtaaacatgcagtagaaaagttaattttttaaaaaatcacatatttttcctacaaaactcagtgtaagaagaatctgaatgatctgtgcttctagaatacttttttttgtattagtttattcatatagctatttgctcttctcctaggactttattgtggcagggtggggtctttaagacctctgtatcacatcactttcaggaagtggatctatggagaatgcagcccctttactcaacacctccaagagccggagcctgtaaaataggcaggaaccgacaaactgcagcaggaaagaaatataaaacataaatagaaaatgattatctcatcaagtagccatgcccgagtccacgatgcattggctcagctctgctcctacatccaacagaaagttccttgcttttcatgaaagagctccttgtgcagtctgatcattcacaagaccatttaattccaaatacaattcggccactaatttcaaactgttatcaaatgtgacagacaggtttgtttttagctcccagtagatgaatggtctgctttaaaattgaacagataacaaaggagatcaggactgagaggcgctagagaaatgaaaacattttctagctcccagtagccaagctaaatctttgcttttttggcaggttactcctcaattaaacatataaaggcaaaagagccagcaggaccatcctgaagcaagctggatttgtgccgttcagctgtgtgtcacagccagccccaggggccagggattcctaatcaacattctcccatgcagacatgggcagggcttttattttagagggtcttaaagaactagaattacatattcctttttagaaatatcaagtgcatctttcctcaggttctctgcaccaacattttttctttctgaccggacattttatatatatatatcagaaaaataatcagtctgcctagaattcccaccttttgactgacaggaagcaccttatcaatgatagcctagctttgtctgaaatcccatctgttttcagacaaacacaatctctacatttttaagagacctgatgctaaaatatgaattacagctttggggacagccattcccaacacacatgaacaaaagaaactaatatatagcatattcaaaactgatactcttcaacctttcttccttgatgcaatgtcagtgagcctcggcatccctccagggtgagggcagatataatagggtagagatagatcgcattgtgcaatgtcaatatcaatttgaaccacctgctgttccttatttattcttatcattgattctacaactttttgcccatatcatgcagttaaattcttcctaatatgacaagccttaaggatttatagacattttcacatgctatagcaaattaccattcttgctagagttctggtaacaacccccagtgggaaatggtaccaaaaaaattgaagatactatcaaagtgatccccggctgctgagatggaaatgaacacgagtcatttttagttaacatcaaaatgaaaaacttaagtcgcagccacatctcagagtgtacgagaaaaacaaatcatagttctcttctatgctgctggcttttaaagattaaccttgaaaggaaaggggacaaaacaaaaagttggtttatgctatatacagtatatagtgccctccatcaacaacgcagggactcacttatttcttggtgagtccgcacttccttctgggtcgctctattccacctcaatttttactttaatattaatatccatacattgacaaacacaccgatgttctcccacacaagacctagcattcagatagtgacttaaacctgcttcttttttcttgcagatgttcccgagactgtggacttgggccttgccaaggctgacaccagaaatgactgcacatatttaggagtaaagaacacaggaacagaaaccaaataccgtatgttttcactcataagtgggagctaaatgatgagaacacatggacacacagaggggaacaatgcacactggggcctattggaagagttgcagggggcaggagggagaggatcaggaaaaatacctaatgggcactaggcttaatacctgggtgatgaaataatctgcacaaaaaaaccccaggacccaagtttacctatccaacaaacctgcacttgtacccctgaagttaaaataaaagtttaaaaattttaaaaaaacaaaacaaaaagaacaggacttataggagacccatcgccaccatcacccggccctataccacatgcccctcttcttcctggctccatccacagcctctccctccagccggcccaccaggtgccccagatgaggttcacctccctaaggccacgtgtgctgcagcttggtcatggatcttttgtggccggcttgagcttggtgatttctgtgagcatctggagggcagagctgaggtctgattaagtcatgcttcttcccaggtcaccctacaccaacatggcaaaggcagcctttagttatttacttcagttttgttgttgttgctgttttttaatattaggtggaaccacataaaatcaacaatattcagccattgttgactcagtccattgagtgtcactcagtcccaggctgaaagcctgagaatctggggccactggtgcaagtctcagagtctaaagactagtgaacacagactgtcaaggacaggagaagaaggatgtcccagctccgagagagagagagagaaaggagaaagagagagagagagagacagagagagagaatggcttttactctgctttttcatcctatccaggtctcagctgaccagacagtgccttcccacattgagggctgatctgcaaaactggcaatttcatatgacttattttaatggatgaaacaaatgagtccatggcatccattccttgtaatgctaactttctcaagcgcctagagtcaagttttttctaggctgtatgaaattttacacaggtcctaagattgtacacattgtcttttatttgcctgactaataggttgcctggtaatgaggacttattggcccaacaagctgccagtgaaccagaatgctttaaacacaaggcaatggcagaagcccaccccagctcagagaggagcttctacttagccccctggagcttcatgatgttttcttcctcttaatggcaaaggtacaaatctccactctgctgttgctgccaagaaacacaagttccttaatgaccttttatattttcactttttctctaccttctctccattcttagagctaaaatgagaaaagaaaaagcttttttcgttgaaggcagttgaaaacttaaattaagacaataatttaaattttcttcactatttttatttttattttttttagatggagtctcactctgtcaccaaggctggagtgcaatggcgtgatctcagctcaatgcaaactccgcctcccaggttaaagcaattctcctgccacagcctcccaagtagctgggattacaggcacccaccatcatgaccggctaattttttatttttgtagagacggggtttcaccatgttggccaggctggtcttgaactcctgacctcaggtgatctgcctgctttggcctcccaaagtgctgggattacaggcatgagccactgtgcccggcctgcagcttttaatattatcacaactaatcagtcacctgacacatagcacttcacaacacttttaaatttgtcatctcatttgatcccttagatcatttgatccctacgtgatctaagggatgactcttcccatttttcatctgaagagactgaggaattgagagtttcagcgtctttctaaaggtcaccccagcaagcaatacagcaggaggcctttcaaagccagcgccctttgggctggcctcactgtctcttctgggaagagggtgaacactctagaaagagtctccacataagcatagacatgtgcccatgactcaggagcttacggggatcagcaggtgccaattcaagaagacaacacagagcagagagcatggaggtgaaccagggagtgcatgcctcgcctaaagtaccaattatccttaggagtcaccagatgtacacctggtcactcagatgcctaatgtgacacctgacacattaaagaaaaagaaaaaagagcaaggcaagcagcagtagaaaaagaaaaaaaaaggaaaatctctgagtcacaagaaagtggctggaattctagtttaaaaatcatatcatcaatgtaagtctgaggccagcccccctccccccacctcaagactgcacctctccatcacagacactgacccctagctggttccaaataactcaattgcctggaggaagatacagtgtaaagtgcagagttacaactgtatgttcattttttttcttctctgtacagctcatcaaacctaccggcccaggccttatgaatgccttctctcagacccagcagcctgccagggagggcttcaaagggcttcaccatcaaactcattgctcataaaatgagaaaatcttgttattttaaaggcttgtacatctaccatgacatgcttaggcaaagcagacaccaagaagcaccccatgtgctgaaactctagtgaccgcatagggactatttcaattcttagtttgtatttgtttagaggctgcagggaactggccttggtgtgagttctagaaaattaaaaagaggttctaattgtatttcatattgcagcttttatttcaatctcagaagctttcttaaagctcagaaagcttttaaaaagcgtaagaacggtgagaagtaatttcgatatttttgctctttatttagtctattgaagcaggactctccaacttagatgcctatagaaatgtaatgtgagtagatgaagtggtcttgggatattctctcaacagatacttgtgaaagtaaagtctatttccacttgtccattaagctaagaaaggcatggtttcattctaattttcctgaaacatgtgtttctcacaatctttccttcacttctgatagaaacaagagtgttagtttgggtttcctaaacacaaaaatctgagacaagggtttggtaacaagtcatttctctgagaagtgatcctctggtggagagaagtcagacaggacaagagggcaagggaggcaatgaagagcgtgctcccaagcactgtaggcagtcaggctccacctgctctctggaagccgggggctctatgggagaaagaatggagcttgctgcagttactttacctgggggcaaggcggtgaggactcttatttttacccaccaacttctgtctgtcattgtttgttggctgctctgggtagcattaacttcccagcacttctggcctgccccagtgtggtcttgggcatgagaggggagcatggagcaaacatgtagggcaccaagagcatgtgctacagggtcagtgaagagtcaattatcctatctctcttctatcaaacccaaagcacaggaacaatggttaatgagcatctgatgctccattttcatgtcagggatcaacagggagtggtgtaggaggggacaacctggtgagtgtctgaactgtcaagaagggcagtgacaggtcagctccagctgacagtttccatgcaggagtgcaggtgaactttcccaggtcttctctttctccagaaagctaggaatctggctctttatgcaacatatgtaacttataaatgttagcaactaacaaaaaccatgttaacatctgcagggatatgcatctcagggctgaattttcctgtgtgtggccagtttctatcttctgatataaagttttgttttagtacctactctatgcccagcattttcttgggtgatatgaggaacttagacctgtttcaggtcacttacagatgtcctagtgggtggcaaagatagttgcaggatgacttagaacatagcacgcatccatgcaacagacagaaaaaaaaggctgctaagattgaagaggcacaagattttaaagaaaaacaaaacacaactaagccttttattgttgaacttaaagacatccatcaatactgcttgacattaaatgctattgttgaacatatatgggagcttaccgtgtgtggggtacagtaccaacaaagtcaaaaccaagtcaaagaccagagcatcaggcagaagaaagaaggtttagctcacgtggcaggggatagaatacctaaaaatatggaatcaaaattttgacgcaggtgaaggttttttttgacacttttacatctcataagttcttttctgaagccatgctcatgtcaggaattttgtaacctcatggcccactccctgctaatctcagaactcccttgaccaacatgtggtccctaagcctctcccatgtggtgtgtgtgcagggtcctcagatccaggaaggggctgagtcagacattttctccaaaggaacttacatgcacctccagggatgcacaggaccatccactgggcgcaggacaaaaacgttgaacaagaaaagcgtgttaatacatgattgtctctggatctcgctctcagatattttatcagatgaacacatgtcccatgtggttcatgaggtcccttgagagagagaggagtttcatcaatcagaagcaagtgtggtttttgcaggttacttggcttggttagtggacttatggatggtgacatcttgttttaaccaaaccaacattcaccaatggacaggaggcttatgaagattcctacagagaaagctgcagactggagataatattgtttctgagctgaactgaggtttgcacagtaaagccaaacatccacactgaggctttgcagcgggagaaaggaggtcatttatttgcagggcaccaaacaaaaaaaaaatcaggcagctcacgcttaacacctggcctccccaatggctcacaagcatgggtttttaaaggcataagctgagtggaacttgaaatgacttctcagaaacaggactttaaatgggtttttaaatttcaggaaagcagaagttgtaggcaaaaattataaataaatactggagttaatacatttatttggactgaaagatatcttgaagtgagggcttacaggtcttacgtagattcaaagattttcttatctgcaattggttaaggaagagaagctttgtttaaaatgttgaggtcagggaaaaaaatgtgaagtctggcccatggccataacttactccaggaagaaatttagaagagagaaaggtggccagagctcagtcctcagttttcctctctccaaggtctaatccccgtggatctatttggtgggcgtcctcagtagggaatagagtttttgaaacacaactcaggatcatataagatgttatctttagtttctatagaaaccaaacatctcctgattctaacttccttggctattgttttaagctcctatttattaccttcttgcttatcaagttgtttatttacttctcatggatcactgggctccttgaattttccttgaaggaacataggatttttatttattcccatgcttggggtggtggggctggcaggctcctcagaaagtgttcctgcttcatctctttactgatgatacgagcacaatggagcagcaaaacggggtgatagaactccatctcccagtttgagctcctttttagccacattatgaggttaaaaaccatgattatcttattagataactggtccaaaaaggtcagcaaaaatgaacaaaacactcaagtgattttgtatctgttgtcattaataatgataggccctaagtaccaattgtgcctttaaaaattagataaagatagtagtagtacatatttataatttacaaataaataaatattgatctactgggaggacaggctgaaaagtctttactaatggagtgcatgaagaaaactgaactagatgaataaattagttggaacaaataaatgaggaaggaaaataaagtactataaaagggaaaacttctatatcaaggttatttcatcatgagattcaaacaacataattaattacacatatttaacacatcatccaaaataggaaacaaaggaaaacttggacttgaaattaccgatcctccccttatcagcaggaaataaacaaacaaataaaaccagaatcgtgtctgagctttgacaccagtctacagaaggtatatcataaagaaatcgccgttctagttcctgagcctcatcctgaccaaggcagattggagagttggggcaaaagcagagacaccatccaatgaggcactaattttccacaatgttttccccaagtcattcactgacttttcaaaaaacaccgattcaaggcaaagaggcacttttgctgtagaactgggtcatgctgcactgaaattcttctttgcaccaggctctggctgcctctcttgtcctgctgattggctttttaataggctctgtgaggctggttaacttttcagtttgagtcatgcacacaagttcatctgggtgttgacagccgcattcctgtgcccggcttcatagcagttcggagctgcactgtagagcattctccactgagctgagcggaacttgaaatgacttctcagaaacaggacttcaggtttctttaacctatttgctactctttctcagcttaactaacaaatatcttcctgttcctctacgtgtgaacttttttgttgttgttgttgaaatgtatccagtaaatcggaaaaggccaaaataatcttcaggaaaaattatctgatttcagaaaattgcaactatcataagtgtgtgtgtgtgtgtgtgtgtgtgcgcatgaaaatctccatctcctcattctcaaacaaaaaagtcaaggtcaattatgtgtcaataaagcatttttaaaaaatttcatgacttcctaagagcacagtttcaaataggacatttcccccaaagcaacccaaaagtgaacagaggaggagccagctcagctgacctgaccaggtcccattggtctcctctcccatcttttaatggatccacctgaccggaacccactgagaggacgccctgatggctagaggctcacgaaggcttgtgccatcactgtgattctccaattctctaaaagcctgttttcaggaacgtctaggtgtttgacacagttaagtgtttgctaaaatgcaatcgtttcagatcagctgaatagaaattagcaggtggtgaccacattttataatatgatttttgaagaagtataactatttgctttcttcaatttagttttttaaaaaccaacttccttacgagaagcaggtttcaaaagatattccacactaaagttactcatttctctaggatgcttccctcttcctgccacctttgagcttctcagtgctgtgactgtgtcctgctcctctttatacccaacttccctggtgagtaacagttgcctgagaagagtgcagtgattgaagaagaagtaagtgggtgggtggctgatttccattttaacctatctcattaagagctgcatagtgggagagagaacaaagcctttgaagtcagtctgagcctgggctctgatgctcactaactgcataacctctggccggtaacctcgagccctacctcatagggctgttgtgaggagtaaatataagcatgcttgtaatagctttccctgagtctgctcagctccctggctacctcctgttctcccacgtgaacccactgtttatggaggtgactgcaggtctgatcacctaaactaatgaaaggggtgatggagcagatcctagggagccaccacagggcagagaggtgtctgaagagaagacagtaatgctcctctctgcttacctttttttaagtttctgtcaaatgggcctgtttgcgggtggatgcagtacctgcccaagcccctgcccagtcctgtgctaggcactgggtgcacagagtagtcccacccatgggtggttcatgttcagccagcacagcaagccaccatctggcagtgaacacaccggtcatgtccccttgctggaactaatcatggcagccagagagacacaaagcctggctcattgaactgaaaggagaagagtagctccctctcacacatcatgtgcttttacgagaagacaggcacgcctgccgcgtgccccatccagctccaggggcccagctgtgttgtgcaaaggaaggctttagacggaggctgacgagctggctttagatggaggctgacgagctggcttcagaaggagccccctgggcaggaagcggccctgcctctgatcttgaatttgaccaactgtgaaccagaatggagaaagggggatgttcaccaattagctgaaagtaaaactcaactcaaacttcaggagcccaaagtggcgatacctcgagccatcccctggcattcttcttatgggtatgaacagtgctgtgagggtgggcagccactcttgaggggctctgactgccctggaagaaaagaagaaggaaattcaagagctgtgagtgcagtcagaaactccagtgagttccaaaaacacaggaagttgagattcaaggtaaaacagaagagggcaaagaacatctgaatctttcactccactgtatcagtaagtccacatttagatcacgcttcctgagaggagggctatgccttatatatcttttcttatttccccatcgaatagttcccagggcctggctgagtggtagtgactgcagtgacagtaacagccattgcttactgtgtacagctatatgtgagtgctttctagacatcacctcattcaatcttctccataatctagaagtaggtactatttatccctactctgtagatgcagaaaggcagtctcagaatggcagagtgaatgggccaggggtgagggctcacacctataatcctagcactttgggaggccgaggcaggtggatcaccagaggacaggaattcgagaccagcctgtccaacacggtgaaatcccatctctactaaaaatacaaaaaaaaaaaattagccgggtgtggtggtgggcacctataatcccagctattcgggaggctgagggaagagaatcgcttgaacccgggaggcagaggttgcagtgacctgagatcataccactgcactccagcctaggcaacagactgagactctgtctcaaaaggaaaaaaaaaaacgaataacagagtgaatggctcaagattacacagccaggaagaagcagggccagcttcttcccagcgtagctctagtgacttagtctctgcccttactcaccattctgccacctttgacgtaactaaccacctaccatctctgacatgacctccccttctctgtgcagccttaaatgatgtctgcttcatttccagtgggtgtggcctccagaaaaggaaattggaaagaacgtggaactctcaacaacgaaagcaatgaagctgccttgcttaaggaggaaaggatggtggtgaccaagtttccaaccttgctgggtgggacaagggcagagaggagcacccaggacccttcactcatgtgaccagcctgaggcagagcaaatggggctgcttaagggcacagctcttctccctaccgaggcaaactcactgtggaaggggctgtttccaagcacctatgatgttgaaacagcaaagttataaccggtcagaaattgcacctttctaaaaagaaattatgacaattagcccacataaaaacattatttccttcaacataggcttgaaattcaaaaccactatactataataatttttcattttcatgggtgcaataattattgcactagagataatggggcccatactagaaagcagaaacaattgccctggtttaagagcttattaatgaacaatacagccatagtcaattaaggcacaggaaggaaacatggctgctggtgactggtgggttggttgctagatttaatttttgttattgggtcagtaaaggcaggaagaaaatacttctcaagtgggagggaaggaaattacaaatttgatgaaaataaatcaccttttgagcttttgagtctttccaattgaggcttggttaatgtaggtgacagcactttctgcctgtgacttggcacagggttattgggagccatttgtaacactcccattctgtctgtaaaaagacattttaattgaaaaatcatttgcccataaaattattatcatcaatttacagtccaccaaagggctgcattatgaccataaaacaatttgtagtggattcattttactcactaaatcactttacattatactgtgaacagaatgattaaagcaagttagcattttgttggcaaagtaattacattattatgcatttcacccacagagatacttctactactgagtccatttgtcttgttgacagaatatctatatgcattggacagaatgcattttctttagttgatgcaattaattttattcaccagacacttttaaacctaagctaaaatgtttttgtcacagaaatagatttgattggggaacaaaattaatcttgcctacatgatttgtgctcagaaagtttcttccaataactgtgcaaatttgcaaacaagtaaacagggagaaaataataagcaagagcaaaacaaaagcctcaaaaagcaattctcctcctgggtctgttttttaaagtcctctatgtacccaggcaggataaaaatccaaagacaccttgaacaggtggagcaggagatggtggtgaaaagagaggggcttctccaacctgaacaatttggctgggaaaatagtgagcacagattaatcttttaaaaagaccccacacaattgcttgagaagcgcctcagctagtgtctttttgtcaccaactttgtatcctagcggtagaaatgactttggactttcctggggccggtgccaggctctgagtgtagtcaggcttgtgaggcagaagtgaagatctcaggcaccccaactgtgtcccatacaagatgcctaaatgggttgtctaaaaccaaacacgagaagcagaaaatggcttgtcttgcacagtgggcattgggcccacctgtttgccgctggaagtcccaggcttcgaaccgcagtcccctccttgcaagaggcccaggacctcagccaccaccagagggcaggaaaccacatctcactctccctgaagcccccacagcacagggcttggcatgcgcaggtcattctggaaagacttccagattcattccctcattcttcaactcctattttctgagcacctactctgtgtcctaaaaagttcagcagtgagcagaaccctgctctgagcaggctgaccacctgctggagaagtcagacaggtgaagaggaaattaagacacagacagtatggggaggaggttccttatggtgtgggaacagttctgtatcttgattgtggtgatgtctatacaaatctccatacaggtgacaaaatttcctagaactgtgcacaaaaacatgcacacacacaaaaaaatgagtccatgtaaaaactggtgaaatctgagtagaccaggtcaattgtttgagtccaggagtttgaggcagcaatgagttgtgattgtgcaactacactccggtctgggccacagagcaagaccctgtctctaaaattaaaaacaaattccaaagtgtaaacaaaaactgaacaaatcagcaacttatttgtccatcgtagtctagtagttaagcacattgtgccaatgccaagttcctgattttcataatgcactacagttatataaaatattgccataggtggaggctgggagatgggtataactctgcacttgttttgcaactgctctgatctataactatttcctaataaatggtttaaagaaacactgatgtgcaaagcactgatggaaaacgcaggaggctgcagaagtccaaagaaacgctggattcttgggggcagcagggaaggtttcctggaaaaactcatatcttcccaaaggcaacccagttaagtgcccagaagggtcagcaggaggggaaaagtgaagctgggagtgacaggcagcagaaatggaggtaactgtagcacagacccagtcccaagacattcagattcaaattgtatttaaatgctggagagttttggctaagctgaaatttaaaagagatttaggacccctaaaggggaagattggctgagaggaaaaataatccttcaggtctgaggagtgttggaaggacacgctggaggcccctcctttgtagtcacgtggctagcaggcacctgcaagctgaaacgtgtgggctggagggactgcggcagtgacatgtctccgcagacctggctgccattcctggttcactggctacacccagctccatggcacccatgtctctgcacattttccccatagaacacatgtaccttattctcccaggattctgccaggtagctctgggcttcatcaagacaactgccacctgctgccacacactcccgcacatcacaatggtgaaatatggggcccacaggcaaggtggagggatgagtagtttggctggagaggctttattccatcaagcccctactgttatccatccatctaaatcatacaactcaggttatcaacactccatgaaacaaccactccaaacttcctgctccaggagtttttattatgaagaccatccaagcctaagcaacaagcaaaaccctgtttctacaaaaaaaagaaaataaattgaaaaatttttctggcatgatggcacgtgcctacagtcatgactacttgggagactgagataggagaattgcttgagctcagtagttcaaggctgcaatgacttgtgattgtgcaactgcacttcagtctgggcaacagagaagaacactgtctctaaaaataataaataaataaaagtccaagtgtaaacaaaaactgaacaaatcagcaacttatttgtacattgtaaaaacatcacagctgagcacttataagttccactgggaaagagacacagggtctgcagccccagatacaataagaaaagtgactgctgtctgacactgagctttatacagattcccgtggagtgcacacagcaaccctgtggaggctgatgctgtatcatcatcatgcacattttatagatcagtgcatgcacaaaaaggttagataacttgcccaagggtgtgcagtcagtatgtgctgggaccatgacccaaatgcagggtgttccgttttctcttccactcaagcaccagctcctccactgtttccatgagcatctccactcaccttgcacaagattgacgcctttccagctccccagactggagctaaggaagcttggagtagctaaggaccattccctgcaacacctccagacacacctcctgacctttatgatacacctggaagacaggtgcatcccctgaaatcccttggaccaaggacaagatccttcagtagcccttggtctttcttgagatacagggaagctttgtaagattcccattaatgaaatatttaggtgatacttctctcacttcagaaaacaaatgagaaaaggagttttgcttacagtacattaagttactttaaattactggaagccatttgtagataacttcctggaaaatttgaatatggataaggatatgttactcatcagcctgacactttcataaaataccctccaaatagaacagcagcaaggaaaggagcatatgttttcatctccaatatgggcattctatgaaatgtaagcactgtatcattactgatccctgaaaaactgggtcataatgagtcttgaacttagaaagtcaaaaattaggttctaaaaaaaagtatgctcctctcaccctatctctatcactgaaaattaaaaagataaatttcaaaagccaaaacacatgacccaaactcttgagcattctgtgagtctaattagatgtgctgttgtcttgatttttgtggaaataaaagcagccatcacagaaagaattgaacggttatattatttgtgaaagtagatttatataaagttagtgattaaggctttgtgacataaagtcatctggtcaatgcattcaaaggcccagtcaatcacccacaagttgaacagatgagacaacaatggcaaagactttcttcaaaagtcaccgctagagggggctctagagacatccaccctggctacccatcagcatcatctggggtgcatgttaaaaacaagatgcctgagagccatcctccaaaattctggttcagtcaccttagggcgtaaccaaggaactggcattttcgtgaagcacccaactcatgcatgtgcagacatccctgagcctgcgaactactcccctatatagctagtcagtctacaaagaggaagctacactggaacacccgccatagagctgtttgcccaaggcctatcttatccggggacagactccttgatggctaaccctgtcctaacacaccctgtccactccatctattttaaattattactgtttttgagtctatcattattaaaggatttaagtttttatattattttagtactttgcatttgaatgatcttttctacagcctctcatctttaaaaagagataaaaatactgcctatgttgtaatctgtaaataagaatgagtgaggtagcccaggtggagttttgcacaggcttgggacataatgtgtgtttaataaatgttggctattacggtgtcattcttgcctgtgacccatcatgtataaggaggaatgaattgtcatcattgcagtggaatacattttggctgcctaggttagataaattgtttaactgtgtgcaatgtccagagattataatttctgctatatggagggctgctgggaaccagagggtatgattgattcgaactttatttcagagactttggttccaagttccaatcctcaaccctcctggccacccacaaagagtcaagaaaatatccaagcatatttccaacatttattggaaacatttattttaaatatatttataatagccaaaaattggaaacaatccaaatgttcatcagcaagagaataaatttcgtatatttatacaatggaatatgacacagaaattaaaaataataaactgctaagaaacacaataacatggataaatcacacagacattgttctcacagctgaacacagtaagccaggttcaaaagactacataatgtatgagggtataattcaggacagtggctacttctgggagatgttaactgggaagaggcaaaaggaactcttctggggagctggaaatgctttatgtcttgtctggttgatgattttagacgtaaaaattaattgagctgtacatttaaaattagtgcactttacaaagtttgctgcatgcattataccttaattaaaaattttttaaagcataagatgcatcttaatgctagtttcaagtgagatttctcacccttttaaactcatctgtgtgtgaacacagcttctcttttacttgcgggtggccccaagtggatggtgggaacaatgcagaataagaaaactttttctcgtcttgtccctcaatttcttattctctcttctctcagtatttctagcttcttttaaagcaccaaatgattattctgtgatcgttaatcagatcgccccactgcctgatttatctgacaaaacagttatttctaaacacctaaactcaatctatccctttccgatgctagcccattactcctcctctccgcaccactgtcctgcatacaagataaatcgctctcagctcagggctgaatgcagtttccatctagaagccaattagggaattgcatttgtttagtctcccaacaacccagatcaatggcagaccctttgatgacttgtgaaataacccaagtaatgggcttgacaatgttgcctcaggaaagattttcagctgaagttgagagaagcagtaaaagtctccttttattcaccaccaagctctatccctcttgactttattcaaaccttgcttcatcttaggcttttctggaagagatattctgggtttcactcttaaaatctgccagctaaaacagagggaaggcccacctgattagctgcctctataatggatttcattaattcgctcacttaatcgttcactaaaaaatcacctatagagcacccgttatgctcagcagacagcagaaaacaaaaccgagtctctgacctcatggaacatatattctagctggagagacataaaataaatgaggtaattttacagaataacaaattacatgagtaaataaaatgagaaagtatgaacaagaatgcccaggaaagtagagacactttatataggactgccagagaagccctctttgaggatgcaacacttgcgcagagacctgaataatgagacacagtcagttatgcacatgctgggaaaatcatcccaagcaaaagaataatcactttcaggggtccaaactctctgtgtgagttctagaaacagagggaaggggaaaccataaagcaaaccctaactttgtcctaccgcctggtctctctacaaggactgcctcctcctttgctattcagcaggggcccttcctagtgccatggcactggctctttctgaaaaaatgccaacgaaaatatcggcaaccaccatgattcattttccaaagtactgttggggtaacccaactcccttgttccaactgaggctgaactgagattcctgaagctctgggagaccaacagcaagactccaattaggcctgaccatgttcaacataaaaagagctgtccctgggaagaaggtgctgatggagacaagctccaaggctgcagcaaagacagcagtgcagatcgataaacacagcacaaattaggatttcattttcaattcttttgtcaagactaattgcatgctcacttcgagtaagatgccctttctgttcagaagcattactgtccaggagaaggtaacacgctggggcttcgaattggcatttcacataatgaggatttcgcagttcaaacaatcactagatattttattctggaaatcgaagctgttagtcaactaaaagtcctcatcctgagctgtgaacatgggcagacattaagcaagcattcggtgacatcactcattccatttctgtcttttcttcccagttctcaggcaccacagatgataacagccactggatccctcaagcacatggaaattcccagaacttcacagatgctcacagatgcatcccatgatcttgacctttgagtaatgggataagcaggtacaaaggagacagaagggccaggctgggtgcttagagaattccaggaagagaaagaggcactagaagtcatggcaggcagcatagagcagtgggtaagtgtacagacctgaggaccagattcgatttccaccgctcaagagccacttggccttacttaagtcacattgtatctctaagtcagcttcctgatctgtgaataagccagacacagaaagaaacatactgcttgatctcacttatattatggaatttcaagaagtcaaactcacagaaacaaagagcagacagtggttaccagggactgaagggtggggaaaatagggagaagttggtcaaatggcataaaccatcagttatgagaataatggtgactatagttaataatattgcatggtctacttgagatttaagagagatcttaagtgtctctccacaaaaaaagtaactaaatggtttacttcacttagcagtctttttggggttcatccgtgttatcacacgtggcaggatttccttcttgtgtggctgaataatattccatcatatataaataccacattccctatatccattcacccattgctagacacttaggttgttgattccataacgtggccatagtgaatgatgctgcaatagccatgggagtgcagatatatctttgatttttttcttttgggtgtatacccagaagtgggattgcagatcatatggtagttctattttttaggaccttccatactgttttccataatagctgtacaaatgtacattcccatgatcagtgcgcaagcgtccccttttctccatgtgcttgccccacatccttcttatcttttgtctttttggtaacagccaactcaccaagtgtgaggtgatatttcattatggtttttgatttgcttttccctgatggttaatgatattgggtaccttttcttgtacttgttggccacttgcatgtcttccttagaaaaatgtctgttgaggtcatttgcccatttttaaatcagatttgtttggttggtagattgctattgagttgtatgtgtttccaacatattttggatattaaccctttatcaaacatatgttttacttttgtctctcagatgaggcatccaggctagctgtgtggcagagcctagctgtgtcagcaggtattgaagcctcagggatgaatgagagaaactggtaaaagaatggagaagaagagatgagagaaacaagccaggacttaattcagagaaattcaacattagaggttcgatttgatatttaatgaatattgcttgtgtgcaaagcttaaatgtcactgtacaaattattttatcacaactatttcatgcatcttgctatttaaactgtccaacattttttggctacaaatatatttaaacatgaatgtctgaatatctgaaatatctagataacttctggcatccacacctttcataatgaccatgaattctcttacactcttccaggaagtagcaaacagatgtgttgctcagtgtgacacaagagaccataggaatgaggctgagaggaaggtctctgcctccatcctgagaggtatcattttcagagggaccccactgaccagatggtgcgatgttcttctctgtctaaatggacaccccaggtatgcagctcagtttgataaaccttgaaacctagtacaggtcagagcctgtggctctcccctcatttactgctcccctcaccaccaagtccctgcctgtctcagatgctcacaccatctggtttctggaggttcctgtaaggaaggccatctgcttcttgttaccatgtcattagaacaattatgacaaaggtgaaacatgaacttgcatgaatcaggcctctctggctcggcttccccatggagaaatatgtactgactttatggtaatttttcatggcaaacctctatctccaagctcctaactctggaaaacagctggaaaataactaagaaacttcaaaaattcaataaatgtcagagttggacctagagcaggagtgacagggagctacatgggatcaaagaggttcgtgttacccattcatagcctagaatgaggcaatcaactaaaaaaaatagaattgcaaatggaagacttttaagtatcaattaggcagggatttgagattaagcatattatctagggctgggcaaggtggctcatgcctgtaatcccagcactttgaggggccaaagcaggaagatcccttgagcccagggttcaagatcagcctgggcaacatagtaagaccccatctctacaataataatattgtagagatagtaaaaccccatctctacagctaataatgataataataataataataataataaattagacaggcatggtggtgcatgcctgtatccaagccactggaaaggctgaggtgggagggtctcttgagcacaggagtttaaggctgcagtgaactgtgattgtgccactgccctccagcctgggcaacagagtgaaactctgtctcagcaaaacaaaacaaaacatttaatgtcattaatcctaaaattcagagaccgccaacactcaaataaagttgggctcacatgcaaagaccaactctccaagaactgggcgtaagatgcatggaggagccaccctccctgcccatctctcctggaaccagcagtttggaatacagaaggggaaatgctagaatagacagctcacctttatttcttacatacttatgatttacaagacttctctgaccattcaagaggcctcagtgccttcattctacattggagtagaataatacgcaaagagatttgcacaaacactttgctagcattgcagcccttactcccccatcaatttagtttgagaccaaatactaaaataccccagcacccagtagcaacctgcttgccagcagagaaagatttgatacaaggtgttttcttttataagagatggttaatcaaatcaggcctgaattatctagatttcatgcattttagcataaaattaattagtttggagaattacgcagtagataaacacaccaaacagctaggcctccttaattgcatgtttacatttttacatccagcttttttcattatcccaaggagctgcctgtagcatgacattcccattaaggaggaggaatccacaaaataatttcatttttctgtctgcagagctcctgataaactgacagtggcttccaagctctccaaatacattttattttcattaaatggctaatctaaaaccaatcaaccaagacatatatagaatgtctgcacagaataagaatgtgtagcttctccagaaagcatgttaaaacaaatccacagcaattattcaggcagacagtacctgataaagggaatctgactgctgcagtagacaccacagcatgggtatagtaatgatggacagactgtaagttgggacctgtctcaccaatatggcggcattagaaacgcaggtgttgtgcttacattgaattactcagtgcaaacagtccacatatggagaagattcacagtcctggaagtatgaatcaaacctcatcacctaacacaggccagctactgctgttcctgaatgaacccaggctaaatctatggaagaaattagtaacgagaagtgagacatcaaactgggtattggtggtgtgaattggtaattggttatatcaacacaaagaccacatgaacaaccacgcttagtgacaagtttccaatgataactgttgtcggccatcatttacaaacggaattagattgttccctttgacgcgcaagtgaaactctttgctgtcaggggctgtgtgctagtgaatggacctagcaccctgacatggcagaagcaagcacagggggcaaagtgaccccatttcccacctaaccgggcagctgtgttctgcttctctcagctgtgcccagtatgagacccagaatttctggaaatgcacttgtatttgtgccaggaatggaggcatttactccatttccaaaatttcttagccctgagtaaaaatacatctacaaagtcaaccccatccacccttttcatgactgtgttaaccaaacaggcacatttatggagcacttattctctctgggagtcagttgtcactgggaagatcacccaagaagaaggacgaaggaagggcctgcctccctcatcacgctgacaggcctacacacctttctacttggcttgagacccagccaacttctttgctcttcctggctgttttcagatacaataaaatcaaaagaaacctcagtggaacaattaactctctggatatatgaaatgccctaggggaagccagattttatatacaagtcttctctgcataggttgcactctcctggattttgtgcttcagtatttggaaggaattatttatgctctgacatgaagctaatgcatgttataaacaaaatctgaatgcacttttcttcctgttgttggtagcctgtgcacctcccaggagcccaggaagcctcttggctgagctaaggacaggcaggcctgtggatgaaacaagtggcacactcactccgtggggtcttcttgtccctgtatcacctgagatgccctggtttgagacatgtgagatgttagctgacttatatgtcagcttttgctgcctaacaaagtggcctcaaacttactggcttaaaagcaacacgcctttattatttctcatgactctgtggtcagctggatggttctggtccagattaggttggctgatctctgcgggacaatctcattggcagtgggtccataacagctggatggtttaggatggcctcacacagacaattggcaggctggaggccagttcccctccttgtggcctcttgtcctcaacagacgagctcaggctcattcacgcagtgacctcagggttctaacagcagcaagagagcgagctgcaatgacaagtgcttctcaagtctctgcttgtgtcattttcggctgatatcctatggccaacaacaagctacgtaatttgtgaccatttttgtgatttaccatagacaattctaagatcacctgcttagaatttaaagagaatcggctaatttaaacatgaaatattaaaactatataagccagacatagaaaagactggcccagtctatgtcttaggctgggtttccccagaagcagactctgagtcaacgacctttgtgcaaatcattttcctgaaaggagaccccagaaagtaactgtagggaagaagggaaatggaggagtagaagggggaaagtatgccggtgatcaggttgttactgcagaaagtggctcagtcccactggggacctctgggaggtgacacagaaagacaccttaaaattctccaacccaggagtccaagagagctgggtatcagtccaccacctcctgtccatcactagttgaggggtgttccagggccatgactccccagaacctctgtccaggctgcacatggcccaagcactgtagtggccagagaaagccctcaggcaggaggtacaggtgagacactgacagcatctgccacagtggaatgacctggacaaggccacctgggcccacacccagcttcggtcattacggtgtgacctctaacaagtttctttatctctctgtgcctgtttcctcataatagtatttatctcataaaattgttaagacaattaaatagatgttattcacttttttaaatatcatgatgtcaacacccaccagggtctgctctcctggaacagacccaggtttctggaaactacttcaggagcccaaaggaaaaaaaatccaaaggtgcttttgctctcagagctgaaagaatttaactcttgattacaggaactgtcaggatttttattaataagtattctgcagtggtgagagacaaatcacagagcataggtaaataagtaggggagaaagcctaaagccaggggaaaacctaaagttagattgcagtggaaatcctcatctcagcacgcctcccacaccaggcaccttagcaaatgctgcatcagagcagagtgctaccagggagaggcagccacctgtgccccatccccagcccatcgtaacttacccagctttaccccttctttccttggtctcctccagaaaagtccttctgggagatggatccattatcacccaagcatctcagcacttcacccgttagcagctgaagccccagaagctctccacatgctgttcagattaacttgggtttgcaggaatttgtttgggatggatgagtctgcaaaacaatcagcatcagtcctgaaattggaagcatgatggactgtgaggaaaacctgtttccagggcttcgctactgaagcctttcctgctttctccccacctcctcagctccctgccggcctttgtagggtcagaaaccctgagcctggcacaccccatggactctctcttttctagcaacagtaatcactaggatttaatgagcactttccttgtgcggacccctgtgctgaatgcccatgtggttgttggcactatggtctcactttacagatgaggactctgaggcacaaccaatcaaagcaggcagaaagtaaagagtcaaacccaggcagacaaaagtcctgttgccacctctgcacgatctgactgcattgcacctttttccatattagtgtgtctgtgcaccttcctcatccccctggctaggctgtaagttgcttcagggcagagtccttggaattcttacgtgtgagggactcagtgaaataatttcattaaattaaatccagcctcttttaccaaatgaaggcatctcttttctgtcatcatttatttcttgcttgagtaaagatagactgtcctgttggtaagcagacctcattgctgggagttctcctatattcttagctgacagccactcctctggctcagaatgattccctcttccatgtgataggccttccagtatgagaagacagcagtcatggcatctcatggtcttttctcctctgtttcagacactctccttctgccatgaaacgcaggtctcctctgccctgggccacttgtctctgaacatcatccctatgaccaatgtgaccttttcaaagctgggtgctcagacctggataagccaaatgtggctgcccagggcataaagtggtgtcttgccaacagctctaccaacatgactggccctcaaaatattttttgtagagtaatagccgaatgtgttgagtaactgggcaaatgacaagcatgacctgaacctcatcattaactttctgagattatgtccttatttgaaaaatggaggtgataatctcagtctttcccacttcaaaggttggcgaagaggaacaaataaaacagcacatatgggaattgcaaaacataattagaagtcatgtgatgtatcaatttaatctcttcactatcacagccaggggaggaccaaacttgccaaccgcttgaggggaaaaagaaggtaggtccattctctagcaacaacaacaaaaaaatctatgattcaatcgagacctaaagacctgacaagcagttggtggaaccaacagggagctcatcctctatgcctacagttgacatcagtcgttttggctgcccattatccttccatccttcttttggtaaaacagtgtctcagcaattttctgggtaaccagccgtccctcactttcacaccaagttaatggaaagggactaactccatgccccagccccaggggtgggctctgattggctttcaccgaatagcatattccaccttcttggtcacagagattggttcgtggatgaacatttccactgacatctcaggccagtaaaaatccagctgaaaacttcttttcaacaattgaaaatagtaaccctctctcttctgctgcatgtgcacaaggaaggctgtagcccctgaagtaccgatagccaccttgagactgaagaaagagcctgccaaagaaatgagcaaacattcctgaaggtgagtcaagaaatagataaagaaagtaaaacctgggtatagtgtttgaagctggatcaagctgtacctgaagtgagacaagccctgtatttttcaattacaggagccaacgaattctctgtaccgttttaccaacttaggtcagattttatgtcacctgatatcaaaaggattcttctgggtaaagtcctctctgtcacttcctacgttttctctgtttccttgtataacttcaagtattataatgcaggaaacagccattcagccatctccaaacagtgagaaagactccatgaacctggtgcaaaccatagagtgccctttctgagaaaatggagatggtagaatctgccttatagagctgttttgaggattaaagaaggtaatgtgtgtaagttgctttgcacattgcacagcacatgttaagtatgcagcctatttttcttttattatccaaaggcactcttctactgtgtccccagcccttcacaaaagcttctaactttaatcacaagagtcatggatgcacaaacacgctaagttacaagtgtaaaatgagaattaaagtcggaccacaaagaagcaacctgcagggaggggccaatgaggaaaggcccctgagcccctgtgagtgtcagtcctggctccttgaagctggtccaatctccataaaggctgccatgcaccatggaacagctgcttttgaggatgtgttagggtttcccagagaagcaaaaccaatacgcacacacaaacacacacactcacttacacacaagtgtaagatgagaattaacatctgaccacacacacacacacacacattaattggctcacaagatcatggagactgggaagtcccatgacatgctgtcacaagcttgggagccaggaaatctggggtgtcattcagtccaagtttgaagacctgagaaccaggggggccgatggtgtaatgtctgagcacagggcaagatgagataagacatcccagctcaacagtgaagcagaaaaataaatgtacttcactaagtccaccaactccaaccccccacagacacaccaaaaataatgtttaaccagacatctaggcatccccagatccagtcagattgacacataaaattatcacaggcagtctttgaaagactcggcaaatttccagaattttggttttaccagcttcaaacagagagagtaaaatcttcctcatcagagtgccctggaatggaggagcctgtgcacccctgggccaagaaactaacacccatctgcccatccttcttttacactagctccaccccaacctaggagatgctccaagtctaaagatgtcttcatcatacttcctccccatcccaagagtcctccttttctccagaggctgcttctggtacccagacagacagtaatagcccctgcatggatgacggacatatcactagatacccccctggcagagtgcatttatagaggtgtctaaccctcctcttaggtacagagagccatatcctttatgcatttgtaaaaatgttcaacatcgtaggtacttaaatgataaattttaaatgtatcttaacatcctcaagtcaccatagtttcagggtctcagcaaattctctatcatcatcatcaataaagccacatgcatcgggtttcccagaactgcttctcagtttccaaaaactgcttttttccagctctgtctgaaaacatctcctttagttttcacttgctttaacctgctatgcaaaaggtatagatttacttaaccaatttacttaaatacttgaccaaatctaacttttactctcctacaaaagatgttcagatttgtcatttcatttacatcttttctgggtccttagaaaatagggtcacattcagtaatgaaatttgttttctctatctatggaaatttgctcctgaagtctgcagccaaaggtgtaggagacagggagaaaaaaaaaaaaaggagaagaaaggaagaaaaagaggagaggaatacagagaaattattttcttgaacactattgtttgatgaaaggtttataaatgcgcataatttttgagactatattttatcagacacactcttacatagtcaattgtaacaatttaaatgttgcttgctttcatggggacaaataataaatttaacaatttaaaaagttatcaagcaagaggataacaatgcagataaggccgggcatggtggctcatgcctgtaatcctaacactttgggaggctgaggcgggtggatcacctgagggcaggagttcaagaccagcctgaccaatgtgatgaaaccccgtctctactaaaagtacaaaaattacccagatgtggtgacagatgtctgtaatcccagctacttgggaggctgaagcaggagaatcgcttgaaccttggaggcagaggttgcagtgagccgagatggcaccattgcactccagccttggcgacagagcgagactccgtctcaaataaataaataaataacgaagataaaagaacatattctggaatgtcattatccagtgacttcaatctcagaaatttcaccgttaggcaaattgagtagcagatttttaggtcttaatggaaaaaaaaagagaaaaaatttgctacttttgggggactatgcttctacccgtccatgcactacttaccttccaagacctgaaatttagacccacatgaccaacccaatggtccacacttgccttgagctcaaggttctcctggtgaaagaaacttcttatagaaatatgtaattgaggtaaagcaaagaagccttactctttacagggactggttctcagctcttgaaagcaaatgtccaagggcctccccatttccaagctggggttggcagggacaggcccacagccagtgcagcctgatgagcccactctatagcaccagccacctggaaactccccacagaggattcactttccaacctcattgtacagtgaagacatctgtgcactcagagcatctgaaggcaagcctgataagcatttgtggattttgtgggtttttttgggcttttttgtttgtttgtttgtttgtttgtttgttgtgagacagagttttgcttttgttgcccaggctggggtgcaatggcatgatctcagctcaccacaacctccacctcccgagttcaagcgattcttcggcctcagcctcccgagtagctgggattacaggcatgcaccaccacacccagctaactttgtatttttagtagagacggggtttctccatgttggtcaggctggtgtcgaactcccgaccttaggtgatccgcccgcctcagcctcccaaagtgctgggattacaggcgtgagccaccatgctcagcctgcattttgttttttaacgaaaagttttggattgtttgtgttttgttttttaagcaactcaggatgagaaagttccaactctattttaagcctttaaatacctcttaactaaagaatgaagtaaatggaaaccacaggcacctgttaacagcccaacgatcagctattttgtattacccgaagccagaaacagcaggcagatggggaaaccaaggtgtacagcaaggtgcagggaattgtttaggttcccaaaattgtggctggcatcagcaggattggaatctaggtccacgacttctaccctgagagacaagagcaggcaggcagtgtggcaccatgaagagagctggattctaaagaggcagtcagtaaaaatccagcacagggcagccaatgtcaccagaaatgcaatctcctctttagaagaggcacgagctccctgctgtcacagagagcattttccatccaataagcagttatggagctgcatttattcccttgtggaaacacataaggaagaacatcctattgtgagcttacagatgccaggacccaagccaactttatgaacaatgacagctcatggcatgtgaatattggtgcatgttccaggaaggagacaaatgctatggtttctctggaaaaagaaaacatggcagcattccacagagaaaaaacaataatgacaaataccctgtccaaagtattacagttatggtcatttcaatggcatagtattgacattgaaatcaataaaagaaatcagttgaatacaattaggaatccagaaacagacctgtgtggaatttagagtgtgacaaacatgacattttgaattggtggcaagaaagagtaaattcacatgacaatattctatccactttggaaaagttaaattagatcaattagattatatacccaacaccatgaacaaaaatattctctggatggcttaatgaactaaatgcacaaaaaccatataagtaatagaagaaactattttttaaatattttgtaatcatttatgttggtgtagggaaaggcatggcatgaaagccagaagccataataggacaaaacagagtgtttatttacactttttaatcttgcatatagcaagtatattaatagaagtcagctttttttttttttttttttttttttttttgagaaggagtctcactctttcgcccaggctggagtgcagtggcgcaatctcggctcactgcaagctccacctcccgggttcatgccattctcctgcctcagccttccgagtagctgggactacaggtgcccgccaccatgcctggctaattttttgtatttttagtagagacggggtttcaccgtgttagccaggatgatcttgatctcctgacctcccccacctcggcctcccaaagtgctggcattacaggcgtgagccactgctcccagctgaagtcagctcttactattggtattaaattctgaaaacaagtctgtttggaacaggctcactgatatccaatagctgctgttactgatgaaggatctgaggcttggagagactggtgtctcagccagggcatttcaggagaaggcaggcaggcaggaaagaacccaggctctgctccctcactcctccactcctcttggtcaaaataactctgaagttagggttaaatagtagggatgaaggctcgtgtttcactctgtacttttcaaagcagtttctctcccattacctcacttggtcagcagaacagcctgtgcaatgggagagcagggtagcttcgatcatctccatttctcagacaaagaaattgaggtatgacagtgagtggctggccctggtcacaagctcctggagcaggggtgtggctggactccacagccctctgttcctggtcagaagtgttcttctttccatcctgctgtctcttgggatgctcgccaatgttttggtgccttcagcagtgaacagcaaaatgcttaccgttcccagacatttcaaagtaaacttgtccatctgacaggagaataagaatcaaagcctccttggaggaaatccagatggcaagcttcttacctccacctttcagctctccacttaattctgtggatggtgctgccaataagccaggcttcatttaactgtcaaaaggacaatgtttcagcagcgttcctgggaataggtgggagggaggagagggctctgggccgtgggtgggagcaaaaagaatgcaggaccccacatccgtgctcactgttcatctgcatctcaacccgtttcattccctggtattttctcttcctgtattcattcctgccatgatgcatgcatacattctaacaggcataaatgtaacaacccagtcaactgtgtatatagattccccgtgagggtacaggcagctcggcttagtttgtgatcatttttatttcattgaaagcctcagagtgtcatcaggtactgttaatttaactgctctatggaatagacccagtttattggagataatggggagagacagtctcagaaaattcaacactgcagagggccctttcctctggagtaatgatcggacacagtgtcaggacgtggcctcctataatgcaccgcaatcgcaatgtaatgatgccttatgaactttaaagttatttccttccgtggagcctgcccttggtgctttctgaaggtgcttgatcatgagagagaagagtgattcactaccggcttttgtaaaacttgtgagatggctgagccagagccctctggccacagagctagaaaggccaggcccaaggtggggctacacagaggccaccaactcaagtcccaggtcatacaggttgctgtcagaccccaatctgccactgatgttggtcaagtgtcataactgtgctgagacaattcacttgcaaatagggacaaatcaaagtaactacctccttgagttgtgggaggattgagtaagaaagtgcttatggcacataagaagtattcagtaagtattgagcattacattatcaatatttactctctatttttttaaataatttcaacttctattttagatttagggcttacatatgcagatttattacaaactatgcatccaacaatggtctaatatccaggctctatcaggaacttaactccacaagcaaaaaccaaataaccccaataaaaagtaggcaaaggacatgaacagatatttctcaaaaagaagacatgcaagtggccaagaaacatttaaaaatgctcaacatcactaatcatcagataaatgcaaatcaaaaccacaatgagataccatctcataccaatcagaggtctattattaaaaagtcatacaataacagaagccagcaaggctgtggagcaaaaggattgcttatgcattgttggtaaaaatgtaaattatttcagtccctgcgaaaaacaatttggagatttctcgaagaatataaaacagaaataccatttgacccagcaatctcattactaggtatatgccaaaggacaataaatcattttactttctatgttttagactgcaaatgtcagcatacttgactggttaaaaagaaaagacagttaattcacatgccatattcttcctccatggtgaaaccatggctaatgcatttcaccttacaagtttttatggaaagagacatacatctgaacatttgtacaatattttttttcacttaaccagacagcgcaatgaaatatttgagaatgtttcatgctaactgttcataaatcagatccgcacactttttttgtgattttacttcactgtttttgccttgtctgtgcaatgcacatcacactcggggccattgttcccctgcctcttttgcaggtttacatgtggcctggaacatcttccatgggttcctcaagagctctccctcctctcctccctgctttgatgtgctgtaggctcccagccttctgcttctccagccaaagaacaccgctaagaaggaaactgtggccctgtaggagcccttgactccttcaccgaggctgatgcatccctcattaggggccctgctcctattcaaggagatcttccctacatctttcttcttccaagtttctatccactgctgtccccttctcccttaggctctgagggtgataggcacatagccatagcaagactcaacaaaaagaacaaatctggtagcatcacattaccctacgtcaaactatactacaaggttatagtcaccaaaacagcatggtaccggcagaaagcaaaaaaaaatgcccttgaaatttttattttttctgtggttttgttttattatataagcatgagcaaaattataatcaacttatgtaatttagaaatgttcaaggggtcttttagttctatcattttatgaattattatttaatatcttggtctcactattttaaaaaaatgccatatgtatacagttttaaaaacctatataattggccaggcaaggtggctcatgcctgtaatcccagcactttgagcggccaaggcaggtggatcacctgaggtcaggagttcaagaccagctcggtcaacatggcaaaaccccgtctctattaaaaacaaaaaattggccaggcatggtggcaggcacctgtaatcccagctactcaggaggctgaggcagggagaattgcttgaacctatgaggtggaggttgcagtgagtcaagatcacgccattgcactccagcctgggcgacagagcgagactccatctcaaaaaaaaaaaaaaatctatataatgaatcatcataaaagaaatgaaaaatacagctgaacaagaagaaaattaaatcactcacaatcatgccacgtatgtatgatgtctttgaaatcaaactgtctatactcacaaactcatatttccttttcatttattttaaaaaattgtaaaaaacattttgtgggtacatttaggtgcatatacttatggagcacaagaaatgttttgacacagacatgcaaagcaaaataattacatcatggagaatggggtatctatcccctcaatcatttgtttttgtgtgtgtgttacaaggaatccaattatagtctgttatttttaaatgtacaattagattatcactgactatagtcaccctgttgtactattaaataatagatctcactcctataattttcatccctacttctcctccaaaattgttgttctcaagcttgccactgattttcactctaataaaggtagacacaattacttagatctcattttatttaacctgtcagcaatgtgtgacccagctgaaaaccctctcctccataatactttcttcacttggctctcagggtctcctggtttttcctcctgctatcccatccatgtaccatcatctattttgcttgcttcttcttgtccccaacctgtcacacattgaagtgttgcaggacccaggccaggatctttctcatgactttcagcaccttgtacatgctaatgacttcccaacgtgtatttccagtccaggtttctttcttgagttccagacatctatatcaaactgcctacttgatacctctttttacttagctgctgggtattgcaatgttatcaggtccaaaattgggctgctgatgttttttgttttgtttttgtttgtgtgtttgtttgttttgtttttgttgtttctgtttgtttttgtttttgttttttgtttgttttgtgtttgttttgtgtttgtttttgtttgttttttgtttggttggttgttttttgtttgttttgtttgtgtgttcgtttttttgtgtgttttttgttttgtttgttttttgtttgtttgtttttgagacggagtctcaccctgtcacccaggctggagtgcagtggcgcgatcttggctcactgcaagctccgcttcccggttcacgccattcttctgtctcagcctccagagtagctgggactacagattcccaccaccacgcccgactaatttttgtatttttaagtagagacagggtttcaccatgttagccaggatggtcttagtctcctgacctcgtgatctgcctgcctcagcctcccaaagtcctgggattacaggcgtgagctatcgcacctggccaatgtttttttttatacctactgctcatgtagtcttcttgcattcatggtaactctcccagcagctctgcctaaagccttcaggtcatccttgacttctttctctctgacacctcacacctaattcatcagccaatagggttaggtctaccttcaaaatacaaccagaagccagtcagatcttccaggtcccagccaccaccatctgttgcctagatgagtgatgagtgactagactgctaattggtcttgtttatttttaatcctcttcccatttattcttaaaagagggtcctattaaaacatgccagattgtgtcattcctctgctcaaaacctttttattattattatactttaagttctaaggtacaggtgcacagcgtgcaggtttgttacataggtgtacatgtgccatgttggtttgctgcacccatcaactcatcatttacattaggtatttctcctaatgctattcctcccccagtgacccaccccctgacaggccccggtgtgtgatgttccctgtcctgtgtccatgtgttcttgttgttcaactccatcgattcccatttcaaatttctttctaatacccaaaaggcagcacatgctctaacctgttttctctttgacttaaacgtctactgttccgttccttttgctctaatccagccacactgagcttcttggaaactttaaagcatgctcagcatgtttccctttgtacctggcagctcactctgtacggagggcttttcccgcagatctgctctcagctcgctgcctccatttcttcagttcttcgatggaaagtcactttctcagcaaggccatatctggccattctaatatttccaccatctctctcctccaacacacatttcattttcctgctttaatttttctcctttaacatatacattttgtttatgctgtttattgttattgtatgttcacttcattctcatgatcaggattttgtctgttcattaccatatccttagtgcaactcaatacatatttattaaataagtgaatagagtttaccgtggtatattattttaaacataaattctcacttaaggaacagtatgacatgggctaattctgacaattttacttggcattatgcacatttgtgggattattttagttatttttaatactctattttctctatatttatattcttccatttaggaaggaaagtccaatattgcggttaatattttttcttttactggttgttatgatagttttaattatggtaaaatgagtcgaaggagttgcaaacttcatttgtattttattagaaataataaaatataagggtgatgaatgcaataaatgtaaaatttgttttcaaaagattatgagccttcaatatctgatataaaaagacacagtttgaatttcttgcttttcatagtaagaaagctattcttgtcaggcacagtctcttctggttaagcagctgctgatgttatacagatttgggggaagagtggaattaaaagcttggccagctctcacaggcgtcagtgggttgatgccacctgcctggtgcagcgtaattatctgagggagactgctatggaatggttggcattcccaggcatgctgattaaggtgagtttgtctctgactggctatctttcagatgcaagcagctgacattgattggttagggaaagagtctagtggtcactgattatgtgtctggatttaaaacgacttctgtgtggctgcttgttattggggctacagatcagactttccttaagtttgaggcaactttcatcagatgttttctgtttcaaagttgccttccatcaactaggttcaaaacaaaaattttttatattccagaaatgtagatgtatttttgaagtttggattaaagaggaattatttaataaccgctctcaaaaagattcccccctcaccttctttaagacacttattctcaattgagagagttatctatatagttatttttcgataaataattattagttttacatgtgtgtgcgtgtgtgtgtgtgtgtgtgtgtgtgtgtgtgtgtgttttaggggctgaggctgaactcctaacatcataatctccagtagaaagttttagtctccttgcaaattaatgtaggttatataatagtgatacaattatgcatgtgtttattttataaaaatataattacaatttttttccaaaaatctacatttttatattaggatcagatacagggctaaaactgtacaaaggcttcaaaattactttattttcaaataatcataagtaatcagaatagtgctatttttgaactacacataatgacatataaatatttttaaagttctccccacactgtatatttcattttttcctttcaggttatatgttttagcttatttttaagaacttgatttaaataaaacattattatattttaaaacaaaacaaaaaacataacaaaaatccaattaggactctcacgcctgtgagtccttgcttgtgggcagtgagctccagcctttgagcgtggtattcaagtttagggtagcattcgtcttgcagtatttgctttcatgtgttttacagttttttgagttcctaggaaactcctagatgcctcgtgcctaacctttgtgctcacattctattctctatgtagaatggttttctcacgcttttttttttggcatcctaactcttacgtatcacattgtatcataattgtatatttacctgtttttaaagcagataatattcattttcttgtatatcgttggaactacatatatatatatatatatatatatatatatatatatatatatatatatatagttcataacaggttttagaatagtaagttaattgaaattgggaacattttgaattttacaaaaaaaagtttttaaaattctttgtcatagagttatttttaaaagattgcctttttaatggatttttttttaagaatactgatacttctttgcatgtgaatgaggtagagaaacatgaaaataaaaactgtacctcaaaacaccctgggattaaacaaatgtttgagaaggccaacttactcactggtggtctgctacaagtgaatgatgacagcagtttaagtaaaataattgaagatgaaggaaggtaaaacttgcaagcttatttccctgtgaaagaatgttagcaatagttactttctctggaaatagaatagtttagtcagccaaggctggaggatcctcaactgtatcaaagctgctgaaagattaaaaattctaatgtaattgaacatgaaaatgatgacctacatgttaaactatcatacatagattattaaaacttataataaacatacaaacacttatgtatgtcaataaatgtgatacattacatcaacagaatttttaaaaatatatatatatataaccatctcaatagatgcagaaaaagcatttgacaaaatctggcattctttatgataaaattgtcttatttcatttaagtttccttcatgtcttttaatggcttgagagctcatttatttttagcactaatattccattgtatggctgtagcacatgttattccttcacctactggaagattagcttcgttgcttcacaaattgattgaatttttatatctatgcttatgagaatttttttgtttaaaatatctttgtctgcttttggttcgtggtgatgctagcattatagaagtttgaatatactcctttttattttgaagggcaaagtttgtgtagaattttattattttttcctacaatgtttggaaggattcaccagcctagctgattgggcctgaaattttatctgtaaaaaggttttcaactgttattttattttattttatggatatgggggaatgtaggttatctattcttgatttatgtttggtaatttaacctttttcaaggaatttttcaattttacctaacttgtcatgtttattcacataaatttaacaatattaccttttttatagtatctgtagaatctgtaataatgtcacattactcaattctaagttactaatttgtatcttctttttttcctgagtaacctagttagacaaaggtttattgcttttattgatctcctcaaagtgtgtagtgttgacttcctctactgtttttcttctctattaatttcatctttgatgatttggtcctttaggctcattattttaaaaaaatcatagcctgagtagcttattaacaaaatgaattgatttcttatggttctggaagttgcaaagtccaagatcaaggtgctgttagatttgatgtctgatgagggactagttcatggttcatagatgcattattttttcctgtgtcctcaaaaggcaaaaggggtgaaggggctttctggggtctcacatgtaagggcattaatttattcataagaacttggcctccattacctaatcacttccaaaaagccccacctctaataacatcagctctgtgatttggttttagtatataaattttgaaaggatccaacattcagatcaccagagatatttatttatttttgtctgcatgctttaagtttagttttatctcctttttactggtttcttaaagtagaagtgaaagttatttgtttgagactcttctaatatagacattcagtgctatatttgtatttaagtatagttgtagctgtattccacaagttttgatatattatgttttcatttttacttagtgcaaaatattttctaatttattttcccttacctctttgactcaggatgggtatttgggtatgtattacttagtttccaaatatttgagtatttcctagagctatttttgttactgatttctgatttgattgatatgcttgtcagggcacatactttgtatgacttatccttttgacttaatcctttttttgagagtaattgtatggcctagagtatgatctatcttggtaagtgttccacaggtacttgaaaagcacagtgttgctcaagactattctattcttgttgattttctgtctccttgttcagtcacttattgactacagggtattaaaacctcaggttactttaaaattgtctgtctgtagttctagatatttatgtctcatatattttgaagctgttatgttaataggggcataaacattttggattatgtcttcttgattgattgaatgctttgtcattgtgacatgatcttgtttattgatgggaatattttttgctatgaaatgtgctttggtattaaggcagccacacctgctcagccttcttctaagtgttagcattctcttttttcaaccttttatccaatttgtgtcttcaaatttaaagcgcatttcttattggcagcatctggttgggtcctgttttgttttgtttttttttaatggagtctgacagtctatattttaactgaggttcttagaccagtgtcatgtgtgatgtaattattgacatacttaggcttacctgtcatcatgctgtttgattactattagccccagctgttctttattccctttttcttttctgctctcttaaagattagtcaagtaacttttcttaatgatttagttttacatttctgttatggcatattaggtataactcttttttatttttatttttgctttcttagtatttgttttagaatttacataattttaacttatcgaagtccaccttcaagtaatattatacaacatcatacatggtataggaaaagtataatagtatagtttcatttcttttctcctagcatatgtacatgtgctcagcaatttttttagatttcagtgtaaagatctttcaaataatttgttcaatttatccctaagtattttatatttttaattctattgtaaatagtattatatttaaaaatttattcctaattatttctaacatgtgaaaataccattgatttgtgcatatttatcttatatcctacaacattgcaaaactaacttactatcttcagtagtaggcttttaaaggatttaattgggatttctacataaatgattatatctgtgattaaagacatttttacttacttcttttctatttagatgccttttatttcccccctttcttgttttccttccttctttctcttctcttttcttttttttaagtttttttgcaataggtagaccttccaggacaatgttgaatagaagtggtaagacctgatatccctgtcttcttgattgtaagagaaagcattcagtctttcatcattatataggatgttagttgtaggtattttaaagatgccctttgaaatgttgagaaaaatcttatgtatcctttatttgatgagattattttttaataagaatggatattaaattttgtcaaatgctctttctgcatatactacacataagtgtatgcttttcctttcattttattaatatagtaataacattaattgattttgaaagagggttaaatattcaacttattaaaataagtgtttaaatgcattttttatttccttaaaaatgtttaaatttgggggaggagccgagatgtccgaataggaaaagctccggtctacagcacccagcatgagcgatgcagaagatgggtgatttctgcatttccatctgaggtaccgggttcatctcactagggagtgccagacagtgggcgcgggtcagtgggtgagcacaccgtgtgtgagccgaagcagggcgaggcattgcctcactcgggaagctcaaggggtcagggagttccctttcctagtcaaagaaaggggtgacagagggcacctggaaaatcgggtcactcccacccgaatactgcgcttttccgacgagcttaaaagagggcgcacccggagattatatcccgcacctggctcggagggacctacgcccacagagtctcgctgattgctagcacagcagtctgagatcaaactgcaaggtggcagcgaggctgggggaggggcgcccaccattgcccaggcttgcttaggtaaacaaagcagccaggaagctcgaactgggtggagcccaccacagctcaaggaggccttcctgcctctgtaggctccacctctgggggcagggcacagacaaacaaaaagacagcagtaacctctgcagacttaaatgtccctgtctgacagctttggagagagcagtggttctcctagcatgcagctggagatctgagaatgggcagactgcctcctcaagtggctccctgacccctgacccctgagcagcctaactgggaggcaccccccagcaggggcagactgacacctcacatggctgggtacgccaacagacctgcaactgagactcctgtctgttagaaggaaaactaacaaacagaaaggacatccacaccaaaaacccatctgtacatcaccatcatcaaagaccaaaagtagataaaaccacaaagatggggaaaaaacagagcagaaaaactggaaactctaaaaagcagagcacttctccccctccaaaggaacacagttcctcaccagcaacggaacaaagctggacggagaatgactttaacgagctgagagaagaaggcttcagatgatcaaattactctgagctatgggaggaaattcaaaccaaaggcaaagaagttgaaaactttgacaaaaatttagaagaatgtacaactagaataaccaatacagagaagtgcttaaaggagctgatggagctgaaaaccaaggctcgagaactacatgaagaatgcggaagcctcaggagccgatgcgattaactggaagtaagggtatcagggatggaagatgaagtgaatgaaatgaagcgagaagggaagtttagagaaaaaagaataaaaagaaacgagcaaagcctccaagaaatatgggactatgtgaaaagaccaaatctacgtctgattggtgtacctgaaagtgacggggagaatggaaccaagctggaaaacactctgcaggatattatccaggagaacttccccaatctggcaaggcaggccaacattcagattcaggaaatacagagaatgccacaaagatactcctggagaagagcaactccaagacacataattgtcagattcaccaaagttgaaatgaaggaaaaaatgttaagggcagccagagagaaaggtcgggttacccacaaagggaagcccatcagactaacagtggatctctcggcagaaactctacaagccagaagagagtgggggccaatattcaacattcttaaagaaaagaattttcaacccagaatttcatatccagccaaactaagcttcataagtgaaggagaaataaaatactttatagacaagcaaatgctgagagattttgtcaccaccaggcctgccctaaaagagctcctgaaggaagcgctaaacatggaaaagaacaaccggtatcagccactgcaaaatcatgccaaaatgtaaagaccatagagactaggaagaaactgcatcaactaacgagcaaaatagccagctaacatcataatgacaggatcaaattcacacataacaatattaactttaaatgtaaatggactaaatgctccaattaaaagacacagactggcaaattggataaagagtcaagatccatcagtgtgctgtattcaggaaacccatcacacatgcagagacacacataggctcaaaataaaaggatggaggaagatctaccaagcaaatggaaaacaaaaaaaggcaggggttgcaatcctagtctctgataaaacagactttaaaccaacaaagatcaaaagagacaaagaaggccattacataatggtaaagggatcaatttaacaagaagagctaactctcctaaatatatacgcagccaatacaggagcacctggattcataaagcaagtcctgagtgacctacaaagagacttagactcccacgcattaataatgggagattttaacaccccactgtcaacattagaaagatcaatgagacagaaagtcaacaaggatacccaggaattgaactcagctctgcaccaagtggacctaatagacatctacagaaacctccaccccaaatcaacagattatacatttttttcagcatcacaccacacctattccaaaattgaccacatacttggaagtaaagctctcctcagcaaatgtaaaagaacagaaattataacaaactatctctcaggccacagtgcaatcaaactagaactcaggattaagaatctcactcaaaaccactcaactacatggaaactgaacaacctgctcctgaatgactactgggtacataatgaaatgaaggcagaaataaagatgttctttgaaaccaacgagaacaaagatacaaaccagaatttctgggttgcattcaagcagtgtgtagagggaaatttatagcactaaatgcccacaagagaaagcaggaaagatccaaaattgacaccctaacatcacaatttaaataactagaaaagcaagagcaaacacattcaaaagctagcagaaggcaagaaataactaaaatcagagttgaactgaaggaaatagagacacaaaaaaccctacaaaaaattaatgaatccaggagctggttttttgaaaggatcaacaaaattgatagaccactagcaagactaataaagaaaaaaagagagaagaatcaaatagatgcaataagaaatgataaaggggatatcaccaccaatcccacagaaatgcaaactaccatcagagaatactacaaacacctctacgcaaataaactagaaaatctagaagaaatggataaattcctcgacacatacactctcctaagactaaactaggaagaagttgaatctctgaatagaccaataacaggagctgaaattgtggcaataatcaatagcttaccaaccaaaaagagtccaggaccaggtggattcacagccgaattctaccagaggtacaaggaggaactggtaccattccttctgaaactattccaatcaatagaaaaagagggaatcctccctaactcattttatgaggccagcatcatcctgataccaaagccgggcagagacacaaccaaaaatagaattttagaccaatatccttgatgaacattgatgcaaaaatcctcaataaaatactggcaaactgaatccagcagcacatcaaaaagcttatccaccatgatcaagtgggcttcatccctgggatgcaaggctggttcaatatacacaaatcaataaatgtaatccagcatataaacagaaccaaagacgaaaaccacatgattatctcaatagatgcagaaaaggcctttgacaaaattcaacaacccttcatgctaaaaactctcaataaattaggtattgatgggacgtatctcaaaataagagctatctatgacaaacccacagtcaatatcatactgaatgggcaaaaactggaagcattccctttgaaaattggcacgagacagggatgccctctctcaccactcctattcaacatagtgttggaagttctggccagggcaattaggcaggagaaggaaataaagtgtattaaattaggaaaagaggaagtcaaattgccctgtttgcagacgacatgattgtatatctagaaaaccccattgtctcagcccaaaatctccttaagctgataagcaacttcagcaaagcctcaggatacaaaatcaatgtacaaaaatcacaagcatgcttatacaccaacaataaacaaacagagaaccaaatcatgagtgaactcccattcacaattgcttcaaagagaataaaatacctaggaatccaacttacaagggacatgaaggacctcttcaaggacagctacaaaccactgctcaaggaaataaaagaggatacaaacaaatggaagaacattccatgctcatgggtaggaagaatcattatcgtgaaaatggccatactgcccaaggtaatttacagattcaatgccatccccatcaagctaccaatgactttcttcacagaattggaaaaaactactttaaagttcatatggaaccaaaaaagagcccgcatcgccaagtcaatcctaagccaaaagaacaaagctggaggcatcaggctacctgacttgaaactatactacaaggctacagtaaccaaaacagcagggtactggtaccaaaacagagacatagatcaatggaacagaacagagccctcagaaataacgccacatatctacaactccctgatctttgacaaacctgagaaaaacacgcaatggggaaaggattccctatttaataaatggtgctaggaaaactggctagccatatgtagaaagctgaaactggatcccttccttacaccttatacaaaaattaattcaagatggattaaagacttaaacattagacctaaaaccataaaaaccctggagaaaacctaggccttaccattcaggacataggcatgggcaaggacttcatgtctaaaacaccaaaagcaatggcaaccaaagccaaaattgacaaatgggatctaattaaactgaagagcttctgcacagcaaaagaaactaccatcagagtgaatgggcaacctacaaaatgggagaaaattttcacaacctactcatctgacaaagggctaatatccagaatctacaataaactccaacaaatttacaagaaaaaaacaaacaaccccatcaaaaagtgggtgaaggacatgaacagacacttctcaaaagaagacatttatgcagccaaaaaacacatgaaaaaatgctcaccatcactggccatcagagaaatgcaaatcaaaaccacaatgagataccgtctcacaccagttagaatggcaatcattaaaaagtcaggaaagaagaggtgctggagaggatgtggagaaataggaacacttttacactgttggtgggactgtaaactagttcaaccattgtggaagtcagtcagtgtggcgattcctcagggatctagaactagaaataccatttgacccagccatcccattactgggtagatacccaaaggactataaatcatgctgctataaagacacatgcacacgtatgtttattgaggcactattcacaatagcaaagacttggaaccaacccaaatgtccaacaatgatagactgaattaagaaaatgtggcacatatacaccatggaatactatgcagccataagaaatgatgagttcatgtcttttgtagagacatggatgaaattggagatcatcattctcagtaaactatcacaagaacaaaaaaccaaacaccgcatattctcactcataggtgggaattgaacaatgagaacacatagacacaggaaggggaacttcacactctggggactgttgtggagtaggggaggggggagggatagcactgggagatatacctaatgctagatgacgagttagtgggtgcagtgcaccagcatggcacatgtatacatatgtaactaacctgcacactgtgcacatgtaccctaaaacttaaagtataataataataaatttttaaaaaatgtttaaatttgagtttaactttaaatcttatattctgttaaaaattttccaagttttatcaattctttttaacattctaaaatatatatgacataaactttaacattttaacaatttttaagtgcacagtttagtttcatcaagtgcatttacaatgtaatgcaacagttactactatccatttctagaacgcttttattatcccaaacagaaactctgtacccattagatattaacttcctgtaagttctaccccagcccatggaaccctctattctaatctctttctctgtaactttacctattccaggtacctcatttaagtggaatcatacaacatttttttgtctgtgtgtctatttcacttagtataatgttttcaaagttcatttatattgtttcaagtatcattacattatttctttttattcccaggtaatattctacctcataaatatcatatttaatgtatcagataatagacatgtggattgtttctaggttttaactattatgaataatgctgctacgaatgtgcacataggcatatgtctctcttgagaaaatactggggagtggaatttctgggtcacatgataactgcatttaatcttgagggactggggaccatcaagttgtttcccaaatcagctgcacaattttacattatcaccagcaatgtaggagggctcccattttttcagatactttccagtctttatttttaatctttttgactgtatgtatcctagtgatgtgaagtgctatctcattgtagctttgacttgcctttctctaatgatgaatgatgttgagcatcttttcatgtggttaatggccatttgtcaatcttattttataaaatatgtagtcagatcctttgagcatattttaattgattgggtttttgttgttgaattgtaagaatgctttatatattctgaacaaaatgtatattactgttttctcataaactttgttctaactcttaatgtcctttgtttctgtattttgaacttttgtttcataaaccacttttttctcaagaatttgccaatagcaccacaatatttctttatgtccatctttttttataatttacttcctcacccaaaaggaaaaaatctatatgcatttttattattcgcccaaaattcccaccccactcacatccactgtattgctataacctacattctctcctggaacaagatatggggaagattaaactttatcttgctgaggtaacctcctttatattatgcatgcattgctttcatgaagttttccacagttgggaaaaccaggcacgttgctgctttgctcaggagcgcaggcttacatgccttgaaaggatgtagtaaaccaacagatggtctaagttactaacaactatcatctcattaattgtcagggttacttataaataaagaaataatttagaacttaaatgtcaaaatattctactacaaagatggcaaatatttgatgaaacctgcaatgtttgttccagatggccaaactataatctagtccctgcctttctcattcaattttttatttttgattttttttacatctttatttgacaaatacatatttccttgttatactatgcttccaggtgacactctgatatatatctcaaatgaccatacacagaattgtgaaagtagttgaggacactcatatcacaaatgaggaaagtcagatcacctcagcagttggctctggaaataggaggaaagagaactatcatcttcctttcatactgagattcaccaattattcaatgtacacaatagaaaccacaaatcaacattagttatttaatacaaaaacactcagtataaagccattgtgagggaaatcatcttttcgaaagtcaattattctagggggaatcttcagcaagaactacataaatcaaaagaagttgacgctgagagaaactcgctttgcccctcatcacattactatctactcgttgacaagaactttaatcttctcacaagtattaagtaaaaacagtgctaactcttcttcatgaactggtttattcccagagctaagacaaggtgtaacttatttggtgtaagggaaacctcacatccattggtccatgtttttgtcagtaaggttaataggtcatcaatgagtatatctagtctccttttctcctctggactctgcagagaagtgtagggcaggtgaagacccttcctgcattggctgggtaaatgttctgtagatgaacatttcttttgttcaggttccaaaatcaagacaaagagaaaacataagaaaatcttttttgtcaaggcaaaaagccctattttctaaatgagcttttaacaggaataacatctttgaatattgatctgacctcttggttttatttctaaattggtttagaactaaaaggggagaggtgtgttatcaatttatacatgaaaagccccaacatccaagaatccatcttaatgtgatctagatatctgagaagcagacataaaatgtatagccctgtttaatggtgattgatacatttccaactgtgttgctgtccataagcaaagtctatgtgcatgtggctggttcatacatttctgtcatagacaccaaggatgccagacaggaccaggcagaagatacaacaggcaatggttttcttttctttttctttcttttttttttttttttgttcacttaaaaatgtccttaatggagcattaaaaataataattttattacttgaaagaccaactgacaaactatggttattcatacttgggtatatgtcataggttttttcaaaaaatcaatgaaaagagcctgtccctccaagtaaaacaactcacggcattctctgccgatgattaaactcacgctttcgagcaaaaaataaaatcttggaaaatttgtatctgccttcacgagcttaatatactaatacttacagatttttctggtgagactgattactcgtgatactaagtaatgtgattttttttaatttttattttattttaagttctgggatatatgtgctgaatacgcaagtttgttatataggtataaatgtgctgtggtggtttcctgcacctatcaaccgtcatctaggttttaagccccgcatgcattaggtatttgtcctaatgctctccctccccttgcccctcaccccccgacaggccccggtgtgtgagatccccctccctgtgtttatgtgttctcattgttcaactctttcttatgagtgagaacatgtggcgtttggttttctgttcctgtgttagtttgctaaggatcatggtttccagcttcatccatgtccctgcaaaggacacgaactcattcacttttatggctgcatagtattccatggtgtatatgtgccacattttctttctccagtctatcattgatggggatttgggttaattccaagtctttgctattgtaaatagtgctacaataaacatacatgttcacgtgtctttatagtagaacgattgataatcctttgggtatatagccagtaatgggattgctgggtcaaatggtatttctggttctagatccttgaggaattgccacactgtcttccataatggttgaactaatttacactcccaccaacagtgtaaaagcattcctattccaccacatccttaccagcatctgttgtttccagacttttaatgctcggcattctaactagcatgagatgatatctcattgtgattttgacttgcatttctctaatgacgagtgatgatgagctttttttcatatgtttgttggccgcataaaatgtcttctttcgggaagtgtctcttcatattcttcacccatttttcgatgaggttgttttattcttgtaaatttgtttaagttccttgtagattctggatattagacttttgtcagatgggtagcttgcaaaaattttctcccgttctctaggttgcctgttcactctgaggatattttcttttccttttttttttttttttttttttttttgagatgagttgcgctctgtcgcccaggctggagtgcagtggcgcgatctcggctcactgcaagctctgtctcccgggttcacgccattctcctgcctcagcctcccgagtagctgggactacaggcgccaaccaccatgcccggctaatttttgtctattttttagtagagacggggtttcacggtgttagccaggatggtcttgatctcctcacctcgtgattcgcccacctcagcctcccaaagtgctgggattacaggtgtgagccactgagcatagctcagcagaagctctttagtttaattagatcccatttgtcaattttggcttttgttgcaattgcttttattcattaagtgtttacctatgcctatgcctatgtcctgaatgttattgacaacagaaaatgattttcacattctgcaggcaagaaggtggacctacgtcttggctgggctgctacttgtaattgtgaagtgccagaaagcaattaccagcttgagtaatgaccagaaatccaaagcatggagactaacaacaaatgtgtccattttcgcttttgttgactatgctatcaaggtcatatcaaaaacagtattgctcagagcaatgtcatggagctttagccctatgctatgctttcttctatcagttttacagttcgactattatattcatctttatttggagttggtatttttatgtggtgtaagggtcaaattttacttttcatatggatatccagttatcccaacaacacttatttaagagactgtcttttttccatactgtgtagctttgcaaaaataagttggctgtaaatgtggagatttatgtccaggttttccgtccagtgcaattgaccaatgtgtctttttatatgctgtactacgctgttttgattacaattcttttaaaatttgtattgaaatcaatatttccagctttgctacttttgctgaagattcatttggttatttggggtcttttgtggttccatacaaatttaagcattattttttcagttctgtaaaaaaaaatggcattggacttttgatagtgattgcattaaatctcttaatggtattatgtacattttcacaatattaattcttccaattcacaaacatgcaatgcctttttatttacttctgtttttgaaattcctttcgttggtgttttatagtttttagtataaaggccttttaccatttagattacatttacacctaaatatttaaatttttataatattctacattagatttttaaatatttcttcagattactttattggtatatagaaacattaccaacatagaaacactactgatttttgtaagttgattttgtaccctgcaacttcactgaatgtgtgcatctgttcccacggttttttgtgaagaagcatttaggtttttttcatatgtaagagcatgtcatcagcaattagagataaattcacttatatattttcataagtttcagatgttttttatttcttgttttgcccgattattctggctaggaattccactaccatgtttaaaataagtgatgagagtgagtatcgttgttttgatcttgattttaggcaaaaagctttcaacttttcagtgtacataatactgtttactgagggcttgtcatatacggcctttctgtggtgagacacatttccactatacttgatttgttgagcattttctccccatcatcttgttctctagtccccactcttattctccactgtcttcttcccactgttcttccctaactccccctctactcctactctctctccccaaagccttcttcccactgtgttctgcttaacaacttcttccctaccgccttccttccccacaccctccttcaccttccatctcccttagcccccaccctcttcttttttattcccccaccctcttctccctcttcattcctgatgctcttcttccccttccctgaccctcttctttcacttttttcttccctgaccctcttctcttcttctccaaccctctttcccttcttccttgaccgctttcttcttctacccttttcttccccttcttccctgacactcttctcctctcccttctactcccaccttctttttcttttttctttaccctcttcttccccttctctcccttcttccttgaccttcttcccctttctccctaactcccttttttaccttcttcccttaccctctttttccctctctttcctttttttcccttttcttccccctcttgttccatcttcttcccagacccccttctcccctctcctcttccccttctttcttcttcttccccgaccctcttcccggctgtcttctcccccaccccaccgtcttctcccacactccctctcgtgtctcctcccctcactccctctccccacagtccctctgcccaaagtcttcttataactgtgttctacccaacaacttctccccaaggtcttcctcctgaccctctttttcccaccccctctttttcagaccatcttctttctgactcccctgcccctcttcaccattttctgtctaactgccttcttccctgccattttctccccattctctcttcccaccatcatcctcacccccttctctgtgaccaccttctccccagaatttttcccccagtgttttctcccccacgatgtcttcttctccacagtctttctcctgaccctcttcttcccaatcatctcccttgttgactccttcccaacccctcatcacagtcttccccccactgtcttcttcccaacattttctccccagaattttatctccagctccccctccaccatcttccctgtacagtgttttatccccaccctctcttcccgacccacccccttctccccagccatcttctcctgaaccactttctcctcaccccctcacgccactgtctaccccaacactccctctccactttctctccatccctctccccagtcttctctccaataagttctgctcaacatctttcaaaattttctcccatactatcttctccaaccccaccatcttcttcccatcccaccgccaccatcttctccccacctccccctccaccatcctcttcttcccactgtccccttttgcaccatcttccccactcattccacccagatttttatccccactccctcaccccaccattattttccttctgggctaccttttcccagaccacttttttcccaactgtttgtccttaacccctcaccccactgtcttcctccccacaagccctctccctaaactcttctccccactgagtgctgcccaacatctcctccccattgtcttctccccaccttcatcttccccatttccatttcccaccctactctcttcttcttcttcaccattttttcttcatcttcttctttgccatttccttttcccaccccaccttcttcttccagactgccccctctccacctccactgtatttttcccactgtgttccacccaatatctttctctccccagaatcttttctccagaagcttctcttcagtgtcttctccccactccccccaccatcatctttcccactccctctccccacacaaccctctttctgacccttttctccctgaccacattctcccaacctccttctccccactccttcaccctacaatcttcttcccacactccctctccccagagtcttctccccactgtgttgtgtccaacatcgtctttccagagtttcctctctagcatgttctctttacatctccaccccaccatcttcttccagatcctctttctccctgaacctcttctccctgatcaccttctccccaccacctttttccacctgctcaccccaccatctcttccctacctcctcctcactctttctccccaatgttttatccccactttcactcctcaccttacttctccaactccctcttctccctattttcttcccccaccgtcttgtcttcttctcccactgtcttcttccccaaccatcttcttccccattccctttctccaccttcttctccaccccatccccaaccttcttcctatcccaccctctttttctgatcgtcctcttccccaccaccttcttcacaactgccttctccccaacttctcaccccaccatcttctcccccctcatacccacagttccactcccaaaagtcttctctccactgtgttttgcacatcttctccccagaatcgtctccccatttcctctccccaaaatcttccttcaaccctctctcaccaccattccatatttttgaaattgttaattgtgctgctataaacatgtgtatgcatctgtctttttaatgcttctttttaataacttcttttactcacagtggtgagatcactggataagaaggaagttctacttttagtttctttttttttttaaaaaaaaaaaacctccatcattcttcccaccatcttctgcccaaactccttcttcccaaagtcttctcccgatctgcccaaaatcatttccccaccatcttctccccacacttcttctccccatcttggaagagaagaagaaggaggaggaaaaggagtggggaaaggtggaggagaagaaggaaaagaggagaaagagaaaagaagggaaggagggtggaagggaaggagagggggaggaaaaggagggtggaggggaaggaggaaaaggagcataaaggggaaagaggaggtggagggggtgaagaagaaagaggagaagaagggtgaagggagaaggaaggtataggagaaggagggtataggggaaggagagtagagggaaatgtggatgaaggaaaaaagggtgagggggaaggaaggtagagggaaaagagggtggaggggaaaaagagtggaaagggaagaggctagaggaaaaaggggggaggagtgtggagaggaaggagggtgaaggggaaggagggtgtagaagaaggaaggtagaggggaaggagggtgggaggaaaggagggtggaagggaaggagtgtggaggggaaggagggtggaggggaaggagggtggaggggaaggagggtggaggggaaggagggtggagagaaggagggtggagggaaggggggtggaggggaaggagggtggaagggaagggtagtggatgggaaggagggtggataggaaggagggtagataggaaggagggtggagatgaaggagaagaaggaggatggagagaaaggtgggtggaggggaaggagggtggaggggaaggagggcagagaggaaggagggtggaggggaaggagggtgaaggagaaggagtgtggaagggaaggagtggaagatgggtagaggggaagaaggagaaggagggtggaggggaagaaggatggaggggaaagaggatgggagggaagggagaaagaaaggtagaggggaagaagggtgcaggggaaggagctggaggggaaggagggtggaagggaaggatggtggagagaaaggaggggaaggatagtggaggggaagaagggtggaggggaaagaggtggaggggaaggagggtggaagggaaggatggtggaggggaagcaggttggaggggaagaagaggctagaaaaatggaggaggtgaggggtgaatggggaagaaaaggttggagggtggaagggaagaagagggtggaggatgacaggtaatgggctagaacaagtggttgtattagtataaattcccaccagcagtgtaaaagccttctctattcaccacatctttgacactatttattgtttttgattttttaattatggccattgtagctggagtaaagggtatctcattgtgatgttaatttgcatttccctgataattagtgatgttgagcattttctatatgtttgttggctgttttcatgtattcttttgagaatggtttatttatttcctttgttcactttttgatgggattatttgtctttttcttgctgatctgtttgagtaccttgtagattctggatattagtcctttgtcaaaagcatagtttgcaaatattttctccccctctgtgggttgtccatttactctgctgattatttgttttgctgtgcagaagctttttggtttgattaggtcccatttatctatttttgtttatgttgcctttgcttttcggttcttggttataagccaatgtttaggagagattatctgatgttatcttctagaatttttatggttccacaccttaggtttaagtctttgatccatcttgagttgatttttgtataaggtgagagatgaggatccagttttattcttctacatgtggcttacctattatcgcagctccacttgttgaatagggcatcttttccccactttgtttttgtttgctttatggaagatcagttgtctgtaagtatttgactttatttctgggttctctattctgttccattggtctgtgtggctgtttttataccaatgccatgctgttttggtcactatagccttgtagtatagtttgaaatcaggtaatgtgatgcctccagatgtgttgtttttacttagtcttgctttggctatgagggctctttttgtgttccatatgaatttgtgtacattgattttgtatcctaaaacaacctcatccttcttctagtaatattgctccagatatctcattaaatttgatcattgcacaacatatgtatgccctgaaacataatatttaaccccataattgtgtacaatgattatgtgtcaattaaaaagaaaaagaaaggggcaggagtggtgatgagagaggaactgggccggggctgacgttttgctgcaggcaggggcagtgatacccttcaggctttaagcaagtgtgttgtcatctctgtaagtcgagccccatgtctcttctagtgacatgaaagaccaggaagtgcacttagcacctaggaacctgccagatagttcatgtgggtttgcatttgggggcacagtataaaggctgggtctttttaatgtctccacctccacccccacaaacaggatggcagagtttcattctcctgcaagacacaaatgaccctactttcctacttaacctcccccgggaaacagcaggaaaaagatcatgcccagtaagctgcttgaagaaatgggtaatgctcctatgctaatttcatgtttcaatcctttattgtattttctttaacaatcgaatttcgctttcaaaattaatgcattaattaaacactatatcctgttcccagcagcctaattatctttgccatgtaatctgttaaaagagctggattaaaatatttgattttaacacatgattttctaagacagttttctaagtgtccaatatttgctaattgaagaaaaaattactgctaattctggcctaaatattgccagtaataagcagccacatcaccccatctcctgctgcttccgccaccatttccacagaatccaacttccaccaacctgaggatctgaagagtttgttgggaaactcccccgcaccgacaaccccaagcctgattctagctatcaggcggatttatgccttgcattgtatagaggttaaagacatatgcaaattcaagtcttggtactgctactgacctctctgggctttaatgaccacaaggcattagtgtattttgtgaattaactcttatatacaccacttttatttacacacttagaacagcgcccagcacacagctagagctatggaagcatttgcgacgatcatcattgtcatcatcatcatcatcatcatcgtcatcatcatcatcatcatcgtcaacatcatcatcgccatcatcgtcgtcatcattatcatcatcatcattgcttctactacaatcaaaggctttttcaggagaggttctaatgggtcatttactctgtggtgtaaatttaagacactgggggaatctgcaataacgtcctagccttaacggtaaaacaaaagacattgcttccatgttaaaattatttcacagaaagacaaatatcgcatgttctcactcataagtggatgataaatgtgttcatgtggacatagagaatggaatgagagagaaggggactgggaagggtgccaggtgggaggggtaaggatgatgaaaaatcagttaatgggtacaatgtatgttattcaggtaacagataccctaaaagccctgacttgaccactatgaagtctatgcacataattacacatgtactccacaaataaaaataagtgaaaatttaatatctatatgttttaggctaaagggaggtgaaggccccacagggtgagttttcctgcctgaagaaaacttcccaggggagctctgtctgcctggaccccagcacgcagcaagcctggccagctttcccctacccacctccccagtagaggagtcacccagagcccatcctgcttcagcccaggcacccgcagagcaggcactcctgggggaaagtgagagtgagacaggctggagtctcatcaatttcacactcagcagatccagaaggagtttatttcagtatacgtgtgtactttgtgaaattgaagaggaaaatatctacatgcatgtgcacacacaccacacacaaatatatacaaatacacacacacatacacacacacaattttgatccagttctgagcaaatgcatctagaggaggaaaaatgtttgtgggctgaaaatagacaagggtacctcctattctcccaacagctcagagttgagcagtgttaacttaaaaatcacaagatgtataaattagaaaaggaggctttcttataaaagggtacagcctacaaggtggctgtccgcaggctgggaagcatagcctttggccaagaccagagacaggcactctgaaagagaaggggtttgggacaggagctctatgctgagcaggttggccaaacatacatattcaacagattgcaggagaatccatgaatattcatgaaggtggtcctgatatatgcatgtgactatatatgatgcatattcactttggggatgagacaacatttaactgtattagcccatccaaaggccttttcagaacacaaggcacatgactgtagaacttccaaaaaccagccagaactagtccatggtcagcagtctctgatcgggagaaagttactgaaatcagcctcttatctagtacaggctgcagttatggctggtgggacaggggtcagttagcctgcgtctgtgagctgggtaacttgtaactgttttaacattgcttatctccaggccagtgcttgctcagctgctggagttttgaaaagaaacacctgtgacagagcacagtttctcctttaagtgtgggagtgtggggcaggatcttaggtccaggttacaatttggtatctattgccacaaaagtccattctgccagtcttacgatctctattttaacatgaacgctggtcacttgctgtgtctgaaccagaaaggagaggggtataaagaggcatgtctgaccgcccatcctgtcatggcaggaactcaacttctctgggtccccttcaccacaaggcatgtctgtttagttgatgaggcttaggattttatttttagtttacagcagagagagtttttccaccctgggtactggcaaagtttgctccctccctcctcctggggtctgcagggggtggggaggggcagtgcagggggctccagccctcagctgcaggccaggcggacagggcaggacacagctgcctgattccagcccagcatcaaagcacccacatagcccagatcagagcagaaaaaaatgtaaaatgacagaaagttgcttttatgtgaatgcacccaagccatgttggatcactgtttagaatgatttggtatttcttttattgttttttttttttatttagtcagtgatttaattatgagaacagcaaatagtgttaaagcttcatgaggcgccaatagtccgggaggcctgaaagagtaaatacaatgatactctgtcatgaaatctactgagtgccttgcagccaccggctcatagcatttggctctgctcccagagaggcataaacaatgcaaaaacccataattactgtgtcagtcacaacatccctgcagaataccgagttccacccccggctgctggcttcctggcattggacaaggtgcacagccacaccgtcctctgctggagagaccccagcgactaggcagccatggacacccagcattcttaggactcctgcccaggcctccatctccccccacccagagatgacagcaagcacagcccagcctgccccatttcttgctattcacagacttccagggaactggggctgtgggcaggtcttccttcctcaacttcacccagggggctccaactgtaaaagaaaataaaacttaggaccctctgaatgtattatgccgaggaggaaggcaagccctggggaatgagtcatgtagcatatttgcagtttttcttcttagatgagagtttaactcttccttgttgttgttctgtaaatgactaatcatgggttattatagattaaatgattatagagcaaatgttatatattaaattatatagattaaatgattaccataaagtcttgtacccaactcagaccagatggtgtccaagacctcagcacggttacagccttaatgtggaaggttaaatatacgttttctgaaagaaaaagaccacctcgtctaatcagatcactatgactatgcagtaagcctctcatagaaagatgtttaaattctgttaaacttttttaggctttgtctgtatacgtgatgtcctgggtgggcctgtcctcaactttgcgcttgaataaactttctttaaactagattcagatccttttgattattttaggtcatcacgaccactgggttcctagatatccttctccctagagcagtgctgtccaattaaatataatgcaagccacatacgtagctttagattttctagtttaaaaaaattaactcaaaaaaattaattgcagtcatgtatcttatctatcccaatatgtccataatattagtatttcaatgtgtaagccatattaaaaaatatgaaacagatattttacattctttggcactaaacttttgaaatcaggtgtgtacttgccacagctcatcccagtctagccacatttcaggtgccaatagccacgtgcaggtaatggcaccatatagcccagggaaccaaaatggtctccctgagccacagcctgccctgggccctgtgagcctggaacagccccaccatcaccccactgtggctttggagataaaggcagggagggattccatcacagggagactgcacctccatctgcccctaggaggttctgccccaaacattttagtccccatgtacacattcccaaaggagcctggacagcctgcctagcagcccctgcctccagcaactgctgctgcagtggaggaagacactagctgccctctgccccctccctccctgccagtcaacagagaatctttgccagcccaacctgcccctccagtcccctacttccctgccccactccctccacccaagcgtttcttgaaatgctgctcagcctgtcctctgctcccctgtagatacctcacaaagaggccctgctgagcagttcagtttccagtggtgcaaataaataaagtggttggtgtttcagataaaagaggagagattcccagcctccccactcccaggggagcgctgaaatctcctgcactgctgcttctcactgggggatggcttacagaacagccccttctggaagacccccacccctcctgcctttaactccaaggaccctgaggtcacattccctcctcttgtctgctcaaatattctgattctcccttcaacttctgttcctttcctcctatattcaaggaaaaagtgtctttttttttctggttccaagcaaatcctacctcttgaagccctggtcctgtctttactcctctactcaggcctcagtcactcagtctctagtctcttgcaccttcagtctctgcttctccctagtctctttctgcagccccaaaacaagtctcttccctcagccatcaccaccagctcccactgcaacatacctcaacctcctggttatatctatttccttcacactcctttctccctaagcctttgcaacctgactttcttctccatccatcctaactctcagaggtcatcaggaccctggtcacacacattctcactgtctacctctcagagtcacctgtagcatgggccaacactttctcttcctgtcacctttgcacagcacgtgggcctgtaggtcttctccaggcagccgcagcacggtctttgcccctctgtgatagtacccaggctctggaaggggttgccacttgctaaggccatggggttcttgattttggaaaccatgacactcatccattcagttagtcgttcaatgagtattttttgaacaactgccacagtaggtgaccagcctgagtcagatactggggatccagcagtgaacaaaacagaaaggcctctgagctcatggagcttgtgttctacttggagagacatgatgtaggcaaaaaacaacaaattaaaaaattcaagataattgcagatagtggcaagtgctatgaagatatagaagcagagtgatatgatgagaaagagaggtttatggggggtcattttttaaatttaatttaattttattttttagagacagagtctcactctgtcacccaggctagagtgctgtggtgcaatcatagcttactgcaacctcgaactcctgggcttaagcgatctgcccacctcagcctctcaaggagctgaaactacaggcatgcaccaccatgcccggggagggcaatttataatagattgaccagccagggaaggcctagctcaggaggaaacacctaatctgaggcctgagtaaaataacggcttcagccaggctgacatgtgcggatggcagcgtcacagatgtccacgctgttcacaactggcatcctttctaatgggtcagtggtcacgactggctgcttagtctctatctcttctggtcccagttatgataaaataaacagtcagagcacaagttgcaaagacctcgcgacagccaggcatgggggtggggggcaggaatgtgacaagtgtggagggtcccataccttacctgcattccttacctgcctcagtaaggtgtttggattttactctcagggcctgggagggtgttgagcagatttcagcaggagagctacattctctgatttgcattttaacaggccactccagctgctgtggagtgtgtattttaggaagatgggagtgaaagcagagggtctggatgggaggctgtcattgtccgggttcctagaaacagacgctggtccagtataagtagtttgtttaggaagtgttgccggaagactggtaggggcaaagggaaatgagatctggaagggagggcagccagcccagggtgtccgcaagcaggttcccactgtcagcagctggagtttgatcccgctgggccctaaggaccgcagtggagaacacatgtctcagatctgtcttgccccagggctgagggcatttgagagttatcacaccagcccagcactcctggcctgatttgtgtgggcagagaggctctgacaaagagacacaggggctggcaggggcaagtcagggcatggggcagggccctgatagcatctgccacccagaggagagaccatgctggcccggaatggagtggcagaaacagtgattaaaagagaagtcagaggcctgtaatcccagcacgttgggagactaaggtaggaagattgcttgaggccaggagtttgagaccagcctgggcaacatagtgagaaccccatctctatcaaaataaaaataaaaataaaaataaaagtgagcaggttgtagaggcagaaacttgtagtcccagatactgaggaggctgaggtggaatgatcgcttgagcccagcagtttgaggctgcagagctatgattgattgcaccactgcactccagcctgggcaatatagtaaagccctctttctaaaacaaacaaaaaaatttaagaaacatgaggaatgaagttgtaataaaagctacaacgcagatgaaccttgaaaaaataacaatatttaagcacattttaaaaaactaataataccaaaaactatttaactgaacacgctaatgagtgaattgtatggtatgtgaattatatctcagtaaagctgtttttttaaaaccagagggaacagtaaagagaatcagaatacgagttaacccacaagactggctgatgaactggatgtcctgggtgagctgatgactgagagacttcaagacctgcagctgggcacagatgggggtgctctgccttgccaaccacttatgccaagctggttggaagctgccattggtcttggtttctccagcctaggaggtcacagggaactggccagggaagggctggagagcttgcagctttatgcagtcttaggcaaagcctgtttttgaatctcacgtccttggtttctcttcccaggcacactcttagcacagctcactgtagctcctcagcccactgtaacgtgccctattccagggagctgggcatctttgggtcacagtccttccttttcagccaatttttcgcgagtccacaaagagctgccactaggaagcaatcagatgctgcagttagagaggccggggaggaggacacacacacccaacctgggaacagcatgagtcatttccctctgtgcctgtggatggacgcccggccagacaaggcttttatctttaactgactctcagaaagttggattcattttgtttttaatttttatgggtacatagtaggtgtatatgcttatggggtatgtgagatattttgacacaagcatgaaatgtgtaataatcacatcagggtaaatggggtactcatcccctcaagcatttatcattgttttgtgttataaatattccaattatactcttttagttatttttaaatgtataataaataatcattgactgtagtcaccctgttgtgctatcagatactagatcttatgtattccttctaatgatattttcgtattcattaacatctccactttcccctctgctctcctccgcattacccttcccagcctctggtaaccattcttccattctctatccccatgagttcaattgttttaatttttaactccaacaagtaagtgacaatatataaagtttttctttctgtgcctggcttattttagttaacataatggcctccagttccattcatgttgttgcaaatgacaggatctcattattttttatggctgcatagtactccattgtgtataagtacattttctttatccattcatctgttgatggacacttaggttgcttccaaatcttggctattgtgaacagtgctgcaataaacatgggagtgcagacatctcttcaatagcctgatttccttcctttcaggtatatacccagcagtaggattgcttaatcatatggtagctcaattttcagttttttgagaaacctccaaactaatctccatagtggttgtactaatctacattcccaccaacagtgtacaaatgttccctcttctccacatcctcgccagcttttgttattgcctgcctttcggataaaagtcattttagctggagtgagatgatatttcaatgtagtttgaatttgcatttctctgatgatcagtgatgttgaacaccttttcatatacctgtgtgtcacttgtatatcttcttttgagaaatgtctattcagatcttatattgggttattaggattttttttttctatagagttgttagagctccttttatattctggttatttttcccttgtcaatgagtagtttgtaaatattttctcctattgtgtgggttgtctcttcactttgtttatttttttctgtgcagaagctttttaacttgatgtggtcccatttgtccatcttgctttagttgcctgtgcttctagggtattgctcaggtattagcccaggctaatgtcctggtgagtttcttcaatgttttcttttagtagtttcatagttttaggtcttagagttaagtctttaatccattttgatttgatttttgtatatggcaagagatggggtctagtttcatgtttctgcaaacagatatctggttttcccagcaacatttattgaagatactgtccttttagtaagtctgctatagttcattacagttggttaaatcaataaggctacatataatttaatcttcttttaaccagctgaacttgtaaagctatatgtgagccaagctaaaaacttctctggtcgcatgcccttcaattgtatctcatttaaccaataaaattttctccattgacttatttctttgacaaagattgctaatcagtttaaagaatggtgcaccaatttaatcacaggtctaggccatggcaatgctccagagagtaccaaatggtaaaactgtgatgggacagacggtgcgtaggtgacctagctagaaactagcccaaattaggtccagaggagatgctgaggacttctagttccagcatctccatttctcttataaggaatgttattccttataagaggaataacctcagcctctcggctgagagaggcttggtgatttgctcaaggtcacacagccagtaaatgtgatcagacggatgatctcttatttctcagtccctgtcttgttcctcacctcccactgacttttattaccaaaaaaatttttttccagttgaccacaggattacgaaaccttaatgaacttcagcaggatgagtaaaatgtgacaccggaaatactcacccacagtatggagtagctattccatgacaggcagggatcctctcactctaccactctgccagctaagcctgtgcatggaggtagtggggggtgtacaagttggccctctgtgtttgcatgttacactcatccagaagagcagacaagagaggattgaggacatgaatctgattgggatggaagccaagaaagagcaaaaaagaaactggctggtctaagagttaaactaccattcaacccagcaatttcattcctgggtatggatccaaaggaaaagaaattctacaagaaagacctatgcacccttatgttcattgcagcactgttcacaatagcagaaacatggagtcaacccaggtgctcaccaatgatggactggatgaagcaaatgtggaacatatacaccatggaatactatgcagccatagaaagaatgaaatcatgtcatgattccagcaacatgaatgcagctggaagtcattatcctaagtgaactcatgcagaagtggaaaaccaaatgcctcacgtattaagtggcagctgaacattgggtactcatggacataaagttgggaacaacagacactggggaatacaagaaggtgaagggtggggtaagggccgaaaaactacctattgggtactgtgctcactacctgggtgatgggttcaatcactctccaaacctcaacaccatgtaatatacctttgtaacaaaactgcacaggtaccccttgattgtaaggtaaaagtttaaaataattaaagacacccaaatagctaaatgaattcaaacaaatgtacatttgaataaaaacactcaatgtggcaaaatcctcacataattagagatacccttgtacaggtcccagtatctagtaaatgctcaaaaaatgaagggaaaaataaacaaaacaaacaaactggcgggcaaatgtgagcaggaagatggcctgagcctatgtctgcaggctgcctccacacggctgactccacagggctgcactcaggactgtgagccacctccgccaagttgggcttccgtacgcccctgagcagtggcagctgagcaacgctgtgcaggaagcaggctgacaatgtgcacaagttcaactcgcccaagcacgttcttcatttcagtgttttaaaacctcatgcattcctgccacctctcttcattatagacactgctgcacataatccgtgcagtgaggggtgagccactcggctggtctcccatctctgggccctcccccctccccattgccctggcaggcagactggatggcagaggagaggccttttgattgagactggaatgaatctgcactgttttcagaagtaggtggacacggggaagcctgcatatttctctaccacccagtgagaatttctcatccacctgcagaattgctaggcctcattcttttgtcatcacagctttctatttctagagacagggtctcacgctgtcacccagactggagtgcagcagcatgatcatagctcactgcagcctcaacttcgggggctcaagtgatcctcccacctcagctcccaagaaactggaactacaggcatgtgccaatttttattttttagagatggagtcttgctatgttgcccaggctgttctgaaactcctggcttcaaatgatcctccttccttggcctcccaaagtgctggaattacaagtgtgagcaaccaagcctggccttgtcatcatagcttaatgcaattgagagtgggtcagttctccaggctggttaacaccagcatctgtagtcaaggctgctaaaacaatttaatttgagggtccagggaggactgagagaagtcctggaaccagtgttgggagaaccaataggcagtgaccctaaacttgctgagcctcaaggcacagagcagagaacacagggaagggcaggagcccagccttcccccgacatcccccccaacctcagctctgcccactcttgaaggtacagctcatgcctcctcttccaggaaccctttcctgactatccagccacagggctgaccacttcttaaaattcctatgcactcagggctcaaaactcacagtcaaattaaatccagcaaatatgtatcagtttctggacactaacaacatggtatttgtctctagggtagctcatcccatgctggaggtggggactgacggagagcaaacctgcaaaatgcaccaaccagctccacgtgttgctggcacatcagagggtggaatggattgggaaggatccatagaggatggcctcccagatgctgtgatggtaaatgagaggcctcctggattccccttatagttgggttctaaagttgacacaaaaagcaaggccatggatggtcaagatgattcttgaaactctcttagaaagatgccatgctggagataaacacacttgctcatagtgactccattcaaccagccttccctccagcattagggtagacctgctcactcagttggcttgtactgcagggccatggtataaggaaaaccagtgtcttcaatgactgaagtcacaatcagtgatgtgagatgcttaggtctggaggttccgggaccaatctgagctaaaaagcggtgatagtgatttctgctctgtcctctctggggcagacacatgcagcatatcatgggcacaattgtcagtgctgtttaaattgtatcctctctctctcttaattgaacttttgtcactgacatgttgtgtgctgggcttctctgcctagcttcctatgtgctctacaggtgcatatctgtcccatccctcagttttatttatgcagaatctgctgcatctctggaagatttgtgagctgactgcaaacacaccaagagtaaggggagcagatgttttctctcagccccgaatcccactcagagtgcacacaagccatggcacagagcaggggcccagagcctgcttgctagaaggatcctctttctccttccccagagactgcacagaaagcaccccggccccttctggggatgtgtgccatactcatggtgcagctctgcagcctcctcctgaaagcacttcctccagaggtgagcaggagtgcctgtcccgggcgtgggaggtggctgggtgcatggcaggagtgcctgtcctgggcgtgggaggctgctgcgtgcaccacaggcgtgcctgtcccaggtgtgggaggctgctgggtgcacccctcctgcagcaccagggccgcttggtgcaatgcctgcaggtgctcaggagacttgcctgtctgggctccttcctgcctgctggatttcctgaagaaagggtctagggaataatgcagggcttggatagtcattgtaccattggccccctgctagggaacccagggatgagaaggggaggctgcaggatttaaggggaagtattctggacagattttcctagcttgcttttaaacaggtttgaatagttcaccctgagttggtgacatttcagcttccttcatctctcacattaggggcaaactaaaatataaagcaaaaaagtcattgaatcatcagggcctcctttttctcttctgtaaaatgggagcaataccactaatctcacaggatggttttgaggattgaacaaaataagttaaatgtgtggtgaataaaagagaaggaaatagtgtctttcacagcaacttgggtggtgctgggggccattatcctaagtaaagaaactcaagaacagaaaaccaaatactgcactttctcacttataagtgggagccaagctatgggtatgcaaagtcatgtacaggggtgtgatggacactggagactcagaagggggaaggttaggagggggaaagggataaaaagtcacctctggggtgcaatgtacactattgtggtgacgggtgcactaaaatgccacactccaccactatactattcatccgtgtagccaaaaccactggaacccccaaagctagtgaaatttagataaataaataaatcaacaaataattttacttagtacaaaatgtgtggcaagctgtaaagtctacaaatgctaagtgctggcagaaaaagctttgcctttcaggggagacaggaaggagagcaatcaggggcctccggaggccatgtgcgcagtcccaggagagtggacctgggggttggaggagcccaacccagcaggaagagctcggagcacctgctcctgcctgagcagcatccgttcctctcccgggggctttcctgtgcggcaccccctcatctgtttccagctcatgggtgtggggttggggggacattgtgagctgaccccacgcccagccctaggactttccaggcatgtaaggggtaagttctctttgtgatgaagccagctggtgacaggctcgagtaacaggtgatcaggagtcctcttcaccatggcacattttgaaaagccatggcatgcagggaggggccagataagccaaggcctttgctgtcaagaggacgaagcacagagaacttctttccatgaacttatctacagccgtctccaaactcgtctcaagcttactggaaggcacagatgcagggcagcccttgccgacaagagtacccactgcctctggcttctgtcttgctctcagcccagaaacagcagtaaacatccagggaaaggtgaactccgcatgttctcaggggattcacattggacctccagagtcaagacgcctctgacaaagggacgcagtgttctgaggctcttgtcttcctcagagaagaaagacagcctcttgttttagcagttgccaaaattccactggcatgccaagtggtggcaggtgaaaatttggacaaccacaaagcacttctgactgtgaaatgttctgccacagctgcaagacagagagactgtttcagagactgtaatgacccacaaaacagattgtctcattacctcctgggaacctggtccattccaggcaaaaacctcttccatttgcaactccagatgttggatctccagtgccactgttgccaatcacagtagttctgggtcttaatataacaggtgccagctgcattagatttttctctgctgcctctgctgggtttcattttcaacctgctacaaattagagggacttctagcaagtcatgttttataaccatttgtgggattggagtaaaatccagcatggtcacctcactgtttcatctgctgttgctttgtctttctgtctggaagagctggatcctttaagtaagggagtcttagaggccgtatcatcatgtttcaatgatttatacatttactggactcactccccttcagcccagtctaaacagatggtagggagaaaactgagcctcctgcaccaaactgttctgactcttggagctttctttgcagtcgcatttattgtgcattattcctgttgtcagggaggcaggtttgaaagctgcagctaattaagaagcccacacaaaaccacagacacacagccttcacttcagggtggcctagaagcacagccaccaactgaaccctgcacggtttgatgccatgccagagaaagtgaacccttggttacacgggattacccggcccatggaatatccacactcaaagctctatccaaagaggtaactcagaagtgaatgttctcaagcttttggctgagccaatctctaaataagtcagtctaggagaatgttatcattggaccaaccaaaccacacatacttggaccccatggaaatgctgatgctttcattgactgtcgcctttaagtcattttgcaccttggattctgtccaggccatgtttaggagactgtaaggttcattgttgcagcaaaagctctgaaggccaagtgtcctattccaactctagctgtgttttttactaactgtgaggctttaggtgcatctcttaacttccctaagctctggtttctgcatctgcaaaagtccctctctgaaagtgatggtgtatgtcaaagacatggagtcaacctaggtgtccatcagtggactggataaacaaaatgtggtacatctacaccatggaatactattcagccataaaggagagcaaggccacaaactttgcagcaacatggatgcagccggaggccattatcctaagcaaactgacacaggaaaagaaaaccaaataccacatgttcttacttataagtaggagctaaacactgggaacacatggacataaaggtgagaacaataaacactgggggctactatgagggggagggaggaggcaaaggtcgaaaactacctattgggtatgatgttcactacctgagtgatgggatcatttgtaccccaaacctcagcatcaggcaaattacccatgtaacaaacctgcacctataccctcaaatctaaaataaaagctgaaattataaaaaaagacataaaataaaaatgatggcacatatgcatctaccagataagtgggtatcaatagcttttgcctcctaagcctcaattttccctctcctagcagccatacctcagtttttttgggggggaaattatgcctctctactctcagttttctgggtaaaagtgaaggcagagggtgatcctgccagtaatttcagacttgaacacgacacttagacctggccaattggggtttctaccgacctggatgtgtggttggcacaggatgtatgcacaactcaaagggtctaatgagagagccccaagctctttcttccttattatgtagggttaggctcacaggaggtgctttatcagagggatggcggtccaggtcattcttaatctttcctgctgctgacatcgctgttccaacatggcctttggacattccatttcagatcctgtgctgatgaaacagacttgtgaatatggctcctgatccacaggatgcaacctgaaccacagaaaatgctgagttctccagaggctgtcttcgtgccctgcctgtttcccttaagtgttcaatgtgtgctgatggcttcctgctgtgagggcctgagactgtccctggagagcttcctaagaaacatcagggttctcactcagggcgggcaggaagcgctgaggagctgatgccttaagaacgaccttcagccaatgatgggaaggactgaaggttgagcgcagcagactccttccctcaggaggcacagctctgtggcctgggctccacagggtcctctggagttctgcctgagccccgctgtccacagcagtgattggctctttaataagcagtgtcttctctctcctccctctgcctcttcacccttctcaactgcgctttctgggttcatctcctgaataaacacttgttctaaaatctttgtctcagggttgtttctaagggaaaactcagcctaaggtaagtcctttcagactcaagataatgggtctatccctggattgaaacagaaggtagaggtaggatgtggtggctcaagcctggaatccaaggcacaggattgggagatcaagacagaaagatagttttaggccaggagtttgagaccagcctgggcagcatagctaaatgctgtctctgctaaaaataatttttagtagacaaattagttgggcatggtgttgcacacctgcagtcccagctactcaggaggctgaggcaggaggatcacgtgagccctggaggctgaagctgcactgagctatgatcacaccaactgcactccagcctgggtgacagagtgagactctgccaaaaagaaaaaagaaaaaaaaggaaagaaaaggaaatacgaggtggaagctagcctggtgcagtacagagggagggatacatctgatgtgtcatctcaatagagttgtttcacaaattgattccaggacccaaacatgaaaatctgtttttgaatagactgaaatttttttactgacatatgttgtactttaacatcacagaatcataccgctggaaaattagctcattctttgagttttaagctctttttctctagcagtgagttttcttccccaatgaaacattaataggaggaaatattgattgagcgctttccctgtaccgtatttgagcactttctgtactcattttttacttagttttctcaatattactgtgatgtagttttcattattttatacaaaagagaattaaaatctcacatagacactcctcgccatcatatgaaatggatagatgcaagagttcttttgtagatgtgactggtagccatagagtccacaatgtgaagggcattcttagacaggattgtgcattgggagactgcagggacatgagataatcctccccctgggagtagggacacagcagcacacagctttcctttgagattttagaacataccccttggtgagtcatctgcaactcctctctctctccctcactcagcctcaccttctcaccagcattccccaagacttgtttctaaagctcagcacagatatctatatagacacacaatggcatggccctgccactatacacatccagatgttacactcaccgtgaatttgtaattaatagcatagcccctcttttcaagggaaaaaagaagtattcaaggaatacttctccaaccattagagggatgtctttctcccctaataaccctctgttctttgcaatcttaaactgagtcttccatgcttactcttaccaaccaatgtggcaatgaatatggccaatcccaggcctccctgctgatgaaagtccacccaatcaccaactttatactgactgatatgtgcccagaaactcttctgaaggacacatcttcagttttgcacaggttgtgaagtgtacccaagtaaactgagggggtcttcaggtcagggtctagacatcaaggtcatgtgctgctgtcaacaccccaaactgcacttaggggctgtatatggaaccagtgaggactctgtggcaattgtgagagggtgcagcttgaagcaaggttcaggcccctgccgcagtcaccacaacgtgggcctctttgctgatgttcataaaagactcgtggttaagcactgttgctcaatcttgctgctagttatctactcagaaaagaaatcattttataaaaagacacctgcacttgtatgtttttttgcagcactattcacaatagcaaagtcatgaaaccaacccgagtgccctgcaatgattggctgaataaacaaaatgtggtaaatatacaccatggaatactacatagtcataaaaaattataaaatcctatcttttgcagcaagctaggtggagctggaggccattatccttagtgaactaactcagaaacagaaaaccaaatactgcgtggtctcacagaactaaacagagctccccacttagtgggagctaaacaatgggcacacatagacataaagacaaaaacaatagacacgggggacccaaaagttggggagggagggttgaaaaattacctattaggtacaatgttcactatttgggtgatcagttcactagaagcccaattcctaccattatataatatagacatgtaacaaacaagcacatatattcctgaatctagaataaaatatatatatatatgtttaaataaagggcttctgtagctgggcgtggtggctcataactacaatcccagcactttaggaggccgaggtgggtggagcactcgaggtcaggagttctagagcagcctgaccaacatggtgaaaccccatctacactaaaaatacaaaaattagccaggcatgttggcacatgcctgtaatcccagctacttgggaggctgaggcaggacaatcacttgaatctgggatgtggaggttgcaatgagccgagaccgtgccattacaatccagcctgggcaacaagagcaaaactttgtctcacaaaaaaaaaaaagaaaaaagaaaaagcctggggggtggcttttgcttagaagtgatagtcatcctcctgaaccagtgtctaggattgttaattttgctgttgaaaatcccgtaaaggaaatatgagcatgtcttcattattttagacaatatatactgaattctgtcaagtactattatatgtgccatggggaaccactcgtggagtttttgtcttttgtgttgctttttttttttttttgagacaggttagattgtggcttattgcagcctcaactttccaggctcaggtgattctcctgcctcagcctcccaagtagctgggactacaggcccatgccaccatgcccagctaatggctaatttttgtttttattttttgtagagatggagtctcaccatgtttcccaggctggtcgcaaacttctgggctcaacctatcctcctgccttggcctcccaaagtgctaggattacaggtgtgagccactgtgcccagcctcacatggagttcaaaagctaggagaagatggaaataaggtcaacaaaaaaatatattttacatagtaataaaagctctgaagaaaattgaacaggttaatgaggaatagggtagcacagtggacgggggatgtgaatttggatggggtgaccaggaacctccctctgaactggccattctggaggggagacctgaaggatgaggagccagccatgaaagctagagagaggccgggtgccatggctcaggcctggaatcctagcactttgagagtgccaagattggagaatcgcctgggcccaggatatcaagaccagcctgggcagcatagccagttcctatgtctacaaaaaaataacaaattaaaaaattagctgtatgtggtggtgcgtgactgtagtcccagctactggagaggctgaggcatcaggactgcttaagcccagaggctgaagctgcagtgaattatgattgcatcactgcatttcagcctggatgaaagagtgagactgggaagggaaggggaggggaggggagggaagggaagggaagggaaacaaagggaagggaagggaagggaaagcagggcagaagaaagaagaaaaagtgcagccaactgttctggggtggaatgagctgggcatattcaaaaatcagtgagaagactgctgtgcaggggatggggagagaggaatcccacatgtaggaaagtgcaaacacttaatgtttgacggctccccctgctccagagagtgctgaatccatggatccaggcctgttcatgaatcctccagaaccaagaacagcgcctataaccagttaccagctcctgtcaccttcccttccaggaggtctctctaacattggttgctgttaagtccaggctgtcactctctcccccctggacacttgccccacattctccacagttcttccagcctccagcctcatcctgcccaggccaccaaactcattttccagaagcacagtttagcataggccatgcctgttcagaaaactttcctggcctcctgccagctgcaggaccaagtccaggtgcctccacctggcccttggggcccagccccacagacccaccctgtccacatcctcttcccatgactttcccgtgcctgtgctcagccaatctgtgctcactgctcccatccctgagctcctcttccccagcttcagggccttggtccaagctgtagcctcctcctgaaatgatacttatgatggaaataataatgaaaatgtagatatcgccttgatattcacaaagccctttctcacatgttattttcttcatcttcacaactttctagacagcgtcttgcctcccctgtacaaatatagctcacccttccaggcctagctctagcggcacctcttccaaggagatcactcagatctctcctccctttgtaccatcttggtccatcatctgccctctaatggccatcatcatgttcagtcgtgaatgctgtcactagtcactcatgctggttccccccacactaggccatctctttgagggcaagaactgagtccagactctctccatggcacccgagacaagacagcagagggtcaacgaaagaacaaataatgatggttcaaatgtgtttctacctgaaagagtgaatgaatgcatgaagaaagtcccaatccttagtgtctccatacataggagacaaaaataatgcaaaaccttttctataacatgaaatcagcttaagtttcaacggacatttgtgctgtaaatagtgagaaaggggatcaagaaagaagtaaaagatccagtcactttaaaacagtgactggaacaatcccaagacaaaatccaagaaaggccaggctctctccctctgatacatccaaagcaggttcatagactgcatgtggaaatggcaatgtggttgctgtgagaggtgtgacgggagcccccaccccagcacccatggaacaccaacggcactcagctgctgcacatatatgtgtacttgagcttatacatatgggtctctaccctattgaggatttcagtggctttttagcccgaggacaaagttccctcccctcacatcatctctgcagggcccagcgcaccatctgtgagcagctgacaatatctgccctccacactgcctcaggagcttgccaaaagctactcagaatcagaagtgcagtattacagccagatgcactgaggaagtgtgcctccactcctgacattagcctctgtgtgctcacatcagcctgggatactgggggctccatgcccggggtagaaggaacgctatagatggccaactagtgttgcaccaaccaggatctaagcaggagttgcctcctcgattaggagtctggaggaaaagccaatcatgtttctggatcatactctccagttgcagctggagttattgagacttagtggaatttattttatttctttgacaaacactgccatattgcataccaaatactgtttttaacacttgataggtattaattcattaaattatcataacaaccctatgggataggtactattagtatcattttacatatggggaaatgagtcctgcaaatttccgtaacttacccatggtcatacagctcgtaggtggcagaccctggatttgaacccaggaagtctgtgttcttaacatcatatgatactgtctgtgtaagttaagggcaaaacatttgggtgcaagacctaacacccaaaagtttactgtctctcctcctctgccgcctccaaaagcctcagactaagcaagaccatcttcactgttggtttggaacattctgaagctcatcagaacactaagaaactgtgttatagtgaatcagcacagaggccacataatgtagcaccatttagctttggagcaggctgctttcccatggacctttctgagtccatgtctccttgttagtacaagagagatatctacagtatcccacagaggtgtttatggaatttcactgaaataacacatgtgaagcacacagggcaaggtcaaggatctagtaaattctctagtaaaacatttgggtgcaagacctaagacacaaaagtctctgtgctgaactaaatgctcttagctgatgtggttgcctgcatcttacaaacacaggttcttaacctggtagtccatgaaccttactatgcagaagaataatgaggaaagtttaataaatacagactcctcagtcccactatgcaaaattctgattcattagctttcaaaggagcccaggaattcatgagggatcccaatacaagagttctcagattctgaggcatccatgactgcaaagaacatcacaaacaactgcattcaattctctgaaattataagaaatatccattgttgaagtaattgatgacctttggcctccttataatgaacacaaatggtaatgggagttggtgacagagtgaatgtggtggccctgccaactgtccattctgctctctctgtaaggacagacacttcccagacatcctctgccttgtaaggagctgggttatctgtaataagaactgatatttattgagtgcctaccaggggaaagccacccttccaatgctttctatacgttttgtacccagttctctgactaaaattactatcttattttatagatgagagaaatgaggctttaagggttgccaaagtcacctaataaagttagaatttctgctctgtcaccaaacacctattcaaagcctaatgccttccattactattccactaggaattaaaattggtgcataaggcacgttatgtttattgcagtactattcacaatagcaaagacttggaaccaacccaaatgtccatcaatgatagactggattaagaaaatgtggcacatatacaccatggaattctatgcagccataaaaaaggatgagttcatgtcctttgtagggacatggatgaagttggaaaccatcattctcagcaaactatcgcaaggacaaaaaaccaaacaccacatgttctcactcataggtgggaattgaacaatgagaacacatggacacaggaaggggaacatcacacactggggcctgttgtggggtggggggaggggggagggatagcattaggagatatacctaatgtaaataacaagttaatgggtgcactacaccaacatggcacatatatacatatgtaacaaacctgcacattgtgcacatgtaccctagaacttaaagtacaataaatataaataaataagcaaaaataaaaataaagtcattcagagtgataaataaataaataaatactggtgcatgaggatccaaaatttctagccatgctatatatctatgagacatgaccttcaaatgacctgatatggactgttgacataaatatcagttatagtctcaaaggcctcataataacttaggtttttgcataaatgaaggaacatgacatataataaagggtgtatatacagagtctattaatgtgtttagtttttaacaaatatatataagagtagataacaaatgaatgttgtctttcaagaatgccaccttgtaaatctgtgcacttttttccagcgatatggcctttgtgcataatattcttggacctcttcttttaacatagcttccagacctgctttttaacctcacgaagaaaccaaaacgttattttagagttgatttatctgttagattaaacattgtattatccagtttgaatgctctttgaacacattttgaatacttcccaatattatcccctctcaaaagatgcatatttatctccctgaggaagagtcaaaaaaaatgcttgtagacaatcatggtacttcccaaattcaatgcaaaaatttttgtgaacaaagatcatatgctggctggaaaactctggactacacattacacaaaacccaacccatgtgacttaaacagtaaaagaaatactgtcttatgtggcaagagaatggagtagggaaattgaggcctttggatgcacagaagtgttatcaaggacaattttggatattaagttcctggggagtttctattaaaatcagccaaattactttatggtcacagtacaaagaagtctcagtaatcatagaaatgaaagacactaattcagtcagaattaaaaagttataaagaatagaaactaactctggccaatttaggtaggaaaataaaaatctactggaagaacatggcggagctcccaaaaatgaaagctgaaaatccaggatcaaaaacggacaagcaccggagtagtccaacatttctgcagaggaatctgattggctgagcttctactcgaagcctgctcattggccaggggagggctgtgcaccctgattaatagccccaccaaaatggtcctcaagggcgaccaaatgattcctcgtaaggaagatgtcatatcgcggcagagagggacttggaggccaggaggccccacacaacaaatactcagtacaagcctcatcaaggcagatcttgcagacactgacttagcagatctaatcttggggcttgcaaagatgacaatgtcagcgctgactgtcaatcttcaggaaaccttgtgtgatggctgctgtcagcacccaagtcactcccccattcccctcgcaaagccagtgcatctacaccatcactcacagccggccacttctttggagagcttttcttgttcagtaggattcaccttacccagaaattcctgagcagctatcctctgtccctgggtgtgtttatctgcattatgtggaaaaacagaagcaaaaagacattttaaacatttgctcccaatgaagaagaaaatagcctatcattttatttaacaataaatgaagtaaaaaaaaatatttacaaccccatagagatgtttttgcattctaaattacatgaaagaggccaaaagctaacattttgacctatttgtccagcactaagtggagtaatcaggtaaccaccacttcaggagcctgcccagaaggtggtcgcacagaactaatcacataaccacagcagcctgtgtacatctcaccccaactctgaccatttgaataagatcagaagaaagtaattataggattcactttaatgtcaagcaacaaagagaactatataaacttggaaaatcgaccttcaagatatagtcatttttatttttaaaaaaagcttaagaaaagacacaaataattggctcatttttatgagattgaacttcaaggacagacattttttggaagtaaaagtcgtctagcagcattacctggtgcctgacccatagcatcccgaaagtgccaagcatgttggcacacactgggagagcctcgtttctagttccccaagaaaccaacagggtccccacttccactctctctcttcagggtaaaaatgtaaccactttggcatcaaaaaaaattctgaattatccacttggctcattgaagatattaattttctggaggaaaaataattcccaacacttactacaatgataaaggagactgttgtttcagctggaatggattccgtaaaagcttgatgtttctgacttggctaatggagtgagagggcacgggttctgtctgcgggtaacgcaaatcagtgccgccaccatcattcagtgggtgtcagagctggccagtgcagtccccgaaggctgcttgccaatgctgggaataaatgatttcccctctttatttgctatgtcaaggaatgataatggagcacattccatgaccatttgtcacggaagcgcagtcccctccatggggaatgtgtgggagtagcaaggacctagtgttttcaattaatcagggccaggattactcacgcaggaaatgaaagagaaaatttaatacttggaaatcgggtgaaagcagcaaccaagtctaattaaaatacactttctgcttcgaatttacatggcaggatccattttatgagtcacctttattcttgttgcatttctcttgcccctggaaactgccttaggcaaaagcacccaggagtttacacctgtgcaggtggtttctttccaatgacctcacgtgaaggcaagactggtcaaagcagatgggttgtgtggccatgttcttcctcctgggttttggcgtggccttgaattattcctccttgccctagactgtgcccaatggtcatgtatgtcgagcacagctccttattcccaattgcagcacctagaattctgctattggcttcaaggtgcaagcccgacaaagccctttggctggcgcacagctctgtgtgtaattaatgggtgatttgtagcaggcttgtgcctcgaatgcattgtttctctcattttcctttctggtgggggttgaagcagccccaggggactgcagcactgtcatgccacagcaaagaggctcctaccaaaaggcaaactaatatacactgtgtagtcctgagcaaactaagcacagacaggatttgttgtggctaattagttttatcacttcacaaaaacctaggttcctagtttccagagaaataattacaattgcaaatgaagaggcaccactgaagaagaaggtcttcagcacaaaagtaaccacagacccccacagcatctcccctgcagtttgagccctgccagggatcagctctaggggtttggaagccctgttgtctccctaggtgtggatgacacacacacatccactagcatctgtttctctgttagttcacaaaagatgtgttcaggggtcagatctttacacacacctgcacccgataacatgatgtatcctggcagattcgcgaaagactcacaatgccatgagtatccatgaatcagtgcaaatggaagacctcagctttgagaaggccacaggaatttcagtcagtcacaaaccaaggctggggtcagggtcatttccagtgggaccaatgaaggtcctgtacttaaggggtgaagaaagacaaacaagaaggaaagaagaggctccctttgagttgctgagtaaaatcagaaattaaaaaatactctgactgtaggtacatggagtacataaagttgaataactagtttaaaatgagctttacttttcaactgatggtcttaatatcttttagactcaaccatgactgtgaagcgaaggaagaaaggagtgaatagtacagaatctgtcgatacatggatatagatccagatctatgcatagatgtctatatatctaaatgtatgtagatatatccatttccatccctatatatctgtgtgaaaccacttctcaattaaaactactcttgctgctgccagacacatctcccttaatgacacctgcattggagaatgtataggcactgtcgaatgctcaaatgtgagctcattaccacattgggttctagtttaaaatgagtcattgtcactatttctctgcaagtcttaagagtagctccttttttgttcgttctgacttagccccaacccagtttcacctctggttttaagtgataatattaaacccttggcccatgcctttgctcctgcgaagactcacatgctaaagactgcagttctcacaacccagcagaaaggggagtctaggcctgccctgactgaatccaggaacaactggctgggtggagaagatcagccaggggcctgcaagtctccatgcctgatagaaagagctgcatagaccaggctctgccctccatacagaaaatgcttcattatttatctggatgtagaaaggtgggaaatagagatgttggcattcagcatccccacatatgggaaaatgccacgaccttgcatgtgaccttcaccttgtcacctgtcctccccaggcaaaaagcaactatcttattgccctttttgtgattagaagcacctcttccagcacaagattgcataggctgcctgtgcccatcaccaaaagtctcagacctaactatttcccaaagcaaaagactcatggcccttccctgtcccctgctgctgagctcctaggcctagtcccccgtggctgctgtgtcctaacgcctttggaaccattgtctccttggcctgtttgctccacccagagagagggtcagggtggtgacctccccaggatgtgtctgcagggtgcagactctcagggctgagctctgggattcatccccaacctctaccaaatcctgcctgctcctagagcagtggagaggcagagtggatgagctgtaccagaatttgcccttggcctgtatctcagaaaactccccatgaaataacacattttagagggaagaagaaagaccatagacttagagataggagattaaatctgactatggtaaaaaatgtttgaaaaattcgttatctctgtttgttcacaacactcactccagttacacccgtcaccccagagcagcagacttttgccttcttaacttgtcagaaccagtgcccagttctcctggggcgttttagatgctgatctcaagctcgccaggtggtgtgagtgggcagccaggtctctcatccacatgagtgatctcagcatctgttctgcctgtgccatgaagctccgcaggggcccttccaaccctgggaatgtgttgccaacaagatcccttctgtccctgtcaggcagaggtggcagagcactccttggcagtaagctttgtacccgaaccatttcttttttcacagtctttagataaggcagtttgagttcatttcaatagctggtacttcccgggttctgccaactgcctgtgtgctgtgaggagaggagagagcttttgtgaaattaagatgaatttcctccatggtttcacctttgtttacacattaataatacactccccacacctgaccgcacgggctgcattgcagccttcactactgctggcagctgtgccactgtcccctccatccacagccacgtctcacgtcttgcctttgcaggatgcccccaacttcccccaagcactgcctccacatgctgtcccttagaaagcggcttcctgagggctggtgtttcccagaagcctctctctctggctttgcaatttccctcttcctgcaagcaggtttcatctctcagactgagatgcatggcagccctcgccagcctggagcccttcccagggtcacttcactcacctggaccccttctagagagccccgtggtaactggttatctccacacattcacctccgggggtggggcctgcgtcttggaacacgctgagcgtatctagtaatgacaagggagagtggaaccatgggggatgtaggtggaaccatgacttctgagatattatagctattacatacacacaaacatgcatgaccatgcacatgcaacccccccacacacacagaaacacacacaccacagaaacacacgcacagagaaagacacacacacaccacagaaacacacacaccacagaaacgcacgcagatcccactgactagttgggaaatgttggtttttttcctttcttttttttttttttttagagggagtctcactctgttgcccaggctggagtgcagtggcgcgatctctgttcactgtaacctccgcctcctggggtcaagtgattctcctccctcagcctcccgagtagctggcattacaggcatcagccaccatgcctggctatttttttttatattttagtagagatggggtttcaccatgttggccaggctggtctcatactcctgacctgaagtgatctgcccacctcagcctcccaaagtgctgggattacaggcatgagccaccataacaggccaggaaatgttgcttttgtgataagaatttggcattgctcggctctgcctggtctctctataagagatgtatgtctacactcaggaatcaacctggtgctcatttttagccaggtaggttaaaaaaatagtagaccttccccatgcatatttttatgtcttcattgatctacaatgattgcacatatttctggggaacatgtgcgattttgataatgcttcctgtgtgtgtttgtattgtttcactcatgtgccttctagggcaccccttttccaaccattcacaatctggcagctcttctattatttggttaatgtaaagaaaaataatagtaacactacattgacattttgaaaatagaaaaatgagtggttggctttttgctctagaactctgcttcgaggggctgtgtaagcaaacaggatggtctccccagatcataggaatttagtcaacgtgagccctcagcctggcgcacagcctcctgccctgcagcctgtttctcttaagctctgtgtggaatgtggtcatctccttggttaaaaccagctcctgaccgagcctggtaatttatagtgagctttcctcatgaccatgctgaagtgtcaatcccaggaggagccacagcttcatcaccataacacgcgacccatgtgctggcagggactcactgcatctgcaccactgggacccctcctctccatgcaatggcgcaccctatccccctccatcacctcataaaaccctcccttccctttcccacactgctttggagaatatgcccgtgtcctccttacatgtgccaagtaataaaactcctgttaatcaacacctgccttctctgccttctcgtggagagtcgcttgtctctcaccaggtagacagattctggttatttttgggaaacagctggcccatatccagatcccccagagaagaggagctgagaacatttctgttcagggctcactgggccctctcctcacctccaggactaggcaatgaccatctgggtgctagaaggaagtgcttctacaaacttgctccagccagataaaagagaacaagcccttcatttgctcacttcctttgcaagcagagtgttgctctgcagtgtgctcctgagaggaaaaaactgccctgttggttcaggtcagtcaagccaagctcagtcacagaataagcaggcgcagtgggggcagaaggtagggagggcatggggaatgtggtaccactggggcggagagcaaagcaatggggagtcagtctcccacatgtgtcttctatcagtttatttattcactcaacagacatttattgaggaccaaccatgtgcaggactgatctgagtcctggggtagaggcgtaagtaagacagatgaggtgcctggtcttaaggggtttgtattcaagtgggagccagggaacaagagacatacaataaagatgtaagtaactaagttattttcagataaccactagtcctgggaagataattaaaaggcagtgggagggagggtaataatgttttagaacccaactggggagtactagcttggtgcaataaaaccagatacccacaaggaggtttttcagcaatagaaagaaaagcttttattgcagttgccaagcaaagacgaccaggcagctattgctcagatcctgaccttcccaatggcttgcaggaaaggatttttaaaggcaggggtaaattacaggaaaacagaagccacaggcaaaatcatcaatcaatacctggaggttacacattggtttagacctaaaagggtgtgatatcttgaagtggggacttacaggttataagcaaattcaaaaactttgcaatttgcaattggtgataaaagagcagctttatttaaaaatctggggtaagtagaaaaaatgtcctttttttgagatagtgtctcactctgtcatccaggctggagtgcagtggcatgaccatagctcactgcagcctcctgcctcagcctcttgagcagctgggactacaggcgtgcaccccagtgcctaaccaattttttaatgtttttttttaaatagtgagatggaatgtcactatgttgcccagctgatctcaagctcctggcctcaaacaatcatcccaccttggcctcccaaagtgctagaattacaggcatagctaccttaccaggcaggaaaagaatgtcaactggctagggtgagtgactttctccaagacccccaggaagaaatttataacaaaagatgatggttaaagttcagtcttcacttcccacttacctgaggtctgcatattggctgatcccttcagtgtgggtccccagtgggggtctgagtttctgaaagacaactcagaagtacaggttaagatgttctccttggattctttaggaaaaacaaacatccctaggactctaatttcctcaggtgtcctttaggctactattgccttcttttttaataagttacttattgacttctggagctagctaggtgcctggaacttcccttgaaggcaatcatgattctccttgatttccatgtttggggtctgcaggcccctaataaagggggctcctgctccatctcaatagggaaagagaaactagatcaggtcctcagggaagaccttggcattgagacctgaatgagaggagagacccaggtaagtgaagtaagaacattccaggaagaaacaaaagcaaggataaaatccttgagttgaatgaatacacatttctcaaaataagacacacagaaagccaccagacagatgaaaaaatgctcaacatcactaatcagggaaatacaaattagaaccacaatgaggcaccactttatcctagtcagaacggctattttttaaaagtcaaaaagcaatagatgttggtgtggatgtagtgaaaatggaacgcttatacgcagctggtgggattgtaaattagcacaacctctgtggaaaaagatgtggatatttgtcaaagaactaaaagtagatctaccattctacccagaaattccactactgggtatctacctcccaaaaacagtcactaaatcaaaaaaacacttgcatgcatatgtttattacagcacaattcacaattgcaaagacatagaatcaacctaagtgcccatcaactgataggccaacacacaatcatgaaatactactcagccataaaaaggaacaaaataatgtcttttgcaacaacttagatggagctggaggccattatgctaagtgaagtaagtcaggaatggaaaaccaaatattgaacattctcacttataagtgggagctaagctatgggtacgcaaagacatacagagtaatataatgaagtgtggagattcaaaagcaggagggtgggaggaaggtgagagaaaataaactacttattgagtacaatgtacactacttaggtgacgggcgcactaaaatctccgtcttcaccactgtacaattcatctgtgtaatcaaaaacaacttgtacccccaaagccattgaaattttacaaaatagaaataaaaaatttaaaagatctttaagtcaagaatatttatgaggataaatacttttgcccaaacccattgaacccaaatgccaccttattcaggaggtctgttggggccattgcacaccccttcctcagagcccttgagccaggagctgctgggtctggctgtctccttcacctcctttaggaggtgactacatcttattcagctctgcctcttccaggccaccaggttcaattgataccagctgttcaacagagactgagtgaatgggccaatgacaatatcggactggagtgacatgtctgtaccgaattgagaattatgacaattttaacattgcagcattctcccacttggagtttaatttgaggttgtattttttcttagtaatcaactgtgaggtaaaaatcaactgtttttggagagttctctgcactttaggggacaataatacagacagctgtatgtcgtagcttacggcagtgttacctcagtctcattgacataaactgatgggctgtctgatgctatgcagatgtggcttcaacatggctagacaggttcatcccagctccaaaaggaaaggagcagataagcatcaggaaggcagcagagtacagaacctctgaaagttcactcctccataaaagccataaaaaaaactggcaaaaatggccagaaacaactttttcagaactctgaaaattcaccaactgcttgcaacaccccagggagtgtttatgtaagaaaagcagctgaatcccagtaagaaccgagggctttgtagcattttgacttgccctagtctcatcctcttgctccagctcagcagcagccttggaaatcacctgcactccctgtactgaaagggatagaatagatctcattcccaaagagagtcattatttgacctgtctagtgcttccctgaaagaccttgtctttattagtggcccagtactaaaagccttgggggagggaggagcatttgcctgtagcatttactagtgtttcaacgggtacagctgcccgaggtaatggatagcatttggggcaaacaatagactaatgaaaagcttaaaggaaaagctgaggaatgagatgtccataaggaccctgaaaagctttgtcacattcctgggaatctataagaccctgagaatctgtccagtagggctttgcacatgtccaggaaccggagaaggccctaagcactcaccactgactgaagttgaggccctgcaggagcgggaaggaaagttgagacagagttgccaatttcctggcagagtgctgaccatgtgccccaacagacgcagaaaacccatctgcaaagactgagagatatttcattccaggcatttaaagaaacctctgtccagttattagctggccactaagctaaataagtagagactttgttaccaaaaaggggtcccgatccagaccccaagacagggttcttagatctcacacaagaaacaatttggggtgagttcataaagtgaaagcaggtttattagagaaagtgaaggaataaaaaatggccactctaaaggcagagagccgcttcagctgctaatgatacttattgttacttcttgattatgtgctaaccaaggggtggatttttcatgagctttccaggaaacgagtgggaaactccctgaactgaggattctttccctttttagaccatatagggtaacttcttaacatggcaatggcatttgtaaactgtcatggcaatggtgggagtgtcttttagcatgctaaaatattataatgagcatataataagccatgaggatgactagaggtcaattccatcaccatcttttggcgggttttagccagcttctttactacaacctgttttatcagcaagtttttgttttgttttgttttgtttttttgagacagtcttgctctgtcacccaggctggagtgcagcggcatgatctcggctcactacaacctccgcctcctgggttcaagcaattctctgcctcagcctcccaagtagtttggattacaggcacctgccaccatgcccagctactttttttttgttttgtatttttagtagagatagattttcaccatcttggccaggctggtcttgaactcctcacctcgtgatccacccacctcggcctcccaaagtgctgggattacgggtgtgagccactgtgtcccacctttatcgcaaggtttttatgacctgtatcttgtgccaacctcctatctcatcctctgacttagaactcctaacctcctaagaatgcagcccaataggtctcagccttattttacccagcctctattgaaaatggagttgctctggttcaaatgcctctgacagcttcagtggccactaggaacctattttgataagtaaaggtaaagaggtaaagaggttaagctgcttttcaagaaacagcaggctgtgccaacaatgctggttttagagctgtaggaacgcaaaagttacacccaaacagaaggaaatgttgacagtgtctgtagggtgcagtgtgggccacagaggaaggttggtctccaggagaatgggactcgaggttgaaaatgggactcaccttggcttacaggtttgcactagcagccgtgtgtatccactccatcactcgtcctctctgcaggatacaaggctttccaatgcaaaatggcacagtgttatgcagagtattaagtgacttgataagcttctcatcaggggatggaatttcctccattcctcacagcaaccagttcccaaggtttattgagggagcgtcttgctaattgtgtggctgttatgccggctttcccagatgaacatttttttttagcatctctcactccctagaaatcccactctgcctcagggatgtaaactaaaactaaaattctaagctccccaaccatctgaatggacccttcctcttggccaagagcattcattccagagtttacctgaaaaacgagttcaggccatgatgaggaggcaagggccggatacccttcaccatacatacgctccccctattggaattcaggcacaactgaccagcatcaacattaaaacagagatcttaagactttttgtagcaataagacaccaaattccagcctgaatgtagtgtagcatcacatgaaaggtatcaggccctgaaagaaatcaaaatattttaccctaaaatagatttctttacacattttaaaatggccctgcaaagctgtctcctgtgggaaaaatttacattctgtagcgaatccccttttccttccagatcttttctctgatccaggagagaattaactaagagtctggcactttttaaaagtcagataagaaacattcacaatctattctttctgaagtctgcaacctggaggcttcatctgcacaataagaatcttggtctccacagccccttatctgaacttgggcactcccttctgttgattctagatcttaactctttcaaccaattgccaatagaaacatctctgaattcacctataacctcgaagcctccccaaccccactgccttcaagttgtcccacctttctgggatgaactaatgtacatcttacagctattgattgatgtcttatgtctccctaaaatgtattaaaccaagctgtagcctgaccaccttgggcacatgtcgtcaggatgtcccgaggctgtgccaaggttattttaaccttggcaaaataaacctctaaattgattgagacttgcctcagataccttttggtttacaagggtgaggtgagtcactgggcagttttattgagactgagaatttggtggttcttggggttccaaaatccataaagactttttttagacctatgtctacagaaatagccaccctcttctaggttttgggtgaaagcagcccttcctggtggaaaagaatttcagcagtagcaaattgtttcttaacatggtaaaaaaaaaaaaaaaaaaaaaaaaaaaaaaaaaaaaagtctgtctcaggaagacacaatgtcattatttccaacaccatcctcaacagggacctagcaaaattatacgggcaacagtgccatcaagtggccaagcaggaaaataaccaatacctgaaaaagcgttttttccaagagtgaaattctggtggaagcgcttggaggagaatcatctgcattcccctggttcccctctttgtcctgggaggcacagacaagctccacattttcaactcaggactttctcaggtttttaaccttttcccaggaggcagtgcgcagcctcaggtcagggctgcctgacttgtcctctatgtgcagctccccttcctcagcccctctgataggcggcgtcctcttcacccgggtactggctgagaggtcacctcctctgaaaactctactcactgcatctaaaggagccactgcactccacacatcactctctacaagacacaagtttcatttttcttcatagcccttttcgcattgaaaatactttctttattcatctatttacctgcatatttcctgcctttcccacaccctcacgccctatgttgaaatttgatgagagtagagtcttacctgccttcctcactgccatgtcccaccattgggaacagtggccggagtagagcctccaatgcaacacgtgcgcttgcatgaatggataaacgggaggaaggaaagaggagagacgcaaaggccagtgttttaccaggaggcccaagtgacattgtctccattagcaacttcgggaccaacatcttacttcccttttttatttttaagattcagtgacttcaaatgcaaagggagttcatattatcaactcttatttagagtgaaccgagaatcagttaatctggctttaaatatccctcaaaggtgcagaattactccaggtattgcacgcagactgtaccttcctttaaaatccctctgtcctcataaagctgctatggacccaggaaatctctaagtgagtcttccctgtgtaactgaggagcacttgtgttaaaatacagaggatctccagcaacagaaaaagagtgaacctttgcctacggaacatgacaatttcctggaatcaaaggcctctctgcagtagctgatcatgttttacatctgtgggttgatcttgaagacgtgggcttatcaatatatcttgtcaacagtgggcattcatttaaataaaatcaaaaactgcaggcaaagttgccagaactggcaatttataggggcattttcactccaggagaactaaaaataagctactgttgagtttggattgcatttttatccacatataaatagctttggtaggtcacagtcgaggcaacattgctaaggaactctgcagtgtctcctcaaattgtcaggccactatcttaaaagacaggcagctagtctatagcaattgtgtggaaaccctccagcttttacttagatccccagctgctgcttcagataattagatgggaaaacttgccctctgagacaggtaaggatgatggagttttccggcagcgaattgcatggcaaatctgggcaagagctcccttccaaagtatctggtaactgagaggaaactcatttagaatttctgtcatgcagagttttcaaaaaagacttggggaaagccgtgcaaacctgcaaagatgatatttgtatctccaggctggaaaagtacccttttatctagtgatggccatgctggcttctctgtaagcactcacgaattgcttttcgattttcatccagaattataacatctgcgtaccgtgccccaccaacccaagtaaatatgaactgtgaatacatcccaccttcatatcacagttcagccgttcttagcattcattcttttactcgttaaacacttgctaagcccttactaatgcttccctcccactgtgcctgggcgggaggcacgctgagatgatgccctgccctccaggtctgaaggaggtgtggcataaggaagagtataactgaaaaagaagattcaaagcacagcaagtaagagcttcaccaactacttgcttcgtgcacttggccagtgacttaaactccctgagcttcagtttcctcacttctacagtagaggtgatggcagaacctgccacttagagatgctacaatctatgtaaattcttcaggatctagccacactattgtaagcagttagggaaaccaaatattttaccccaaaatatatttttgaaataatttgagatggctgttcagagatctggcaaacagaagtctccctgcaaagctgtcttctgtggggggagatttgcatctgtagggaagctgcactgatactgcgagtttttctctgaggcctccccttgtccttgtctggatctaggaaagattcactgagatcatgacaccttttaaggtctaaaaaagacatctaccacctaccctctctgagggcagccacctgtgaggttttagctacttaacaagcctacctatgctagccaggcctcatcttctccccctcccatcacctgttttaccaccataatttgttttgccgcaatccaagccccaattatttttatttaatttcaattttcattttagattcaggggatgtagcatgattgaacccatcacccaggtagtgagcatagttcccaatatacagtgtttcaacccttgccccccttcccttcccttcccttgtaacgtccccagtgtctgtcgttcccatctttatgtcaatgagtgcctgatgttcagctcccacttataagtgagaatatgcagtatttggttttctgttcctgcattaataggcttaggataatggcctccagctgcatccatgttgctgcaaagaacatgactttcgtcttttttatggctgtgtagtattctacggtatatatgtacaacatgtaaatccacaaatgtagatttctttatccaatccacagttgatggcaagtcccatttttttctgtagcctcaagatggcatgtaagcttctgaacccctttgggaggtaggagtccttactctgtgtttttctccctgtgtgcacattaacacatttatatgccttttctccaattagtctgacttttgtgggttgatttttttctttgcaaaccttccgatatagctgtgtccccaactaaatctcatcttgaattcccaggtgttgtgggagggacccggtgggaggtaaatgaatcatgggggcaagtctttcctgtgctgtcttcatgatagtgaataagtctcatgagatctgatggttttaaaaatgagagtttttttgtgcaagctctctctttgcctgctgccatccacgtaagacgttacttgctcctccttgccttccaccatgattgtgaggcttccccagccatgtggaactgtaagtctaattaaacctctttcttttgtaaatttcccagtctcaagtgtgcctttatcagcagcatgaaaacagactaatgagcattagacagactaatgttcattagaacagtaaataggcaccagtgcagtggagcactgctgagaagatacccgaaaatgtggaagtgactttggaactgggtaacaggcagaggttataacagtttggaggattcagaagacaggaagatgtgggaaagtttagaacttccaagagacttgttcgatgggtttgacaaaaacgcggataatgatatgaacaataagttcaaagttgaagtggtctcagatgcagatgaggaacttgtggggaactgaagcaaaaatgactcttgctatgttttagcaaagagactggcagcattttgcacctgccctagagatttttggaactttgaacttgagagagatgattagggtatctggcagaagaaatttctaagcagcaaagaattcaagaggtgacttgggtgctgttaaaggcattcagtttcaaaagggacacaaagcataaaagtttggaaaatttgcagcctgacaatgcaatataaaagaaaatctttttttctgaagagaaattcaagccatctgcagaaatttgcataaggaggagctgaatgtcaatccccaagacaatagggaaaatgtctccagggcatgtcagaggtcttcacatcagcccctcccatcacaggcctgaaggcctaggaggaaacagtggtttcatgggatgggcccagggttcctatgctgtatgaagcatagggacttggtgtttgtgtcctcgccactccagccatgactgaaacgggccaatgaagagcctgggccatggcttcagagggtgcaagcctcaagccttggcaactgtcaagaattggggtttgggaacctctgcctagatttcagaggatgtacggaaacgcctggatgtccagtcagaagtttgctgcaggggtgggtccctcatatagaacctctgccagggcagtgtggaaggaaaatatggggtcagagtcaccacacagtgttttaactagggcacttcctactggagctgtgaaaagagggccactgtcctccagaacccagaatggtagatccactgacagcttacactgtgggcctggaaaagccaaagacactcaacaccagcctgtgaaagcagttgtgagggaggctgtaccctgcaaagccacagaggcagagctgctcaaggccatgtgagcccacctcttgcatcagcatgacctggatgtgagacatggagtcaaaggagatcattctggagctgtaagacttaactgccccactggattttggacttgcatgaggcctgtgtcccctttgttttggccactttttcccatttggaatggctgtatttacctaatccctgtacccacattgtatctaggaagtaactaacttgcttttgattttacaggctcatagtcagaaaagacttaccttttctcagatgagaatttggactgtggacttttgagttaatgctgaaatgagtaaaggctttgagggactattgggaagccatgattcattttgaaatgtgaggacatgagatttgggaggggctggggtgaaatgatacagcttggttgtgttcccatccaaatctcatcttgaatttccaggtgttgtgggagggaccaggtgaaaggtaattgaatcatgggggcaagtctttcccatgctgttctcatgatagtgaataagtctcactagatctgatggttttaaaaatgggaacttttctgcacaagctctctcttttcctgatgccatacatgtaagacataacttgctcttccttgccttccaccctgattgtgaggcttccccagccacatggaactgtaagtccaatcaaacctctatcttttgtaaattgtccagtcttgggtatgtctatttcagcagtgtgaaaacggactaacacaccttcagaagtggagtttttctcttggcccctaataaactggaacttcaaggattcagctgggaaggggaatatttccaggcacccatggttacacagctggtgagaaaattcccaaaggctttatggagttctggcactttgggtgaatcacttcctggcctcaggactcatttccttattatttagttgtggaagttgaattaaagttgattccatccagctcttactttctattgtttgacctgagtcataaaaaataggatttggacttgcagagataaaagagaaaaggatattcccagaggagactagcagggagtattctttaatcagaaacatcacccttgttgaccaccatctatagaacatttaattcagcagttgcttcctgagcatctaccatatacccaggagagatgttcaaaatacttaacagctaggcgtgggccccaatggcctaaggaatggatgctggccaaggtgctggggcagggtctagggacctctgctgggccagtgttacctaacaggggatcttgatgaggtcctgggataggagcagagtggccaggaaaagaagggggagtattaccatggtagctcggtgcagtgacttgttactaataacatgtaaattctcacactccaatgtgtcaaagttgagtaaaattcagcccctttcctcagtctctcaagcaagcaatgctcccatgagccagcaacttcatcagtgggaatgacaatgagtgacaaggcccagtagaggcagccagcccacgagaggcaggggattgactccctccaactgccagggaggtgagatcaggcacagtcttcctctcaggggtcattcctaacccagacagtgctcaggggaaaggacagacatttccctctgtgcagatccaagcggtaggccgattaccaggggcagctaccacaaatgtaaatacagagtgaaaaatggaggcaaggccaaatgaacgctggcaggtctagggtgatgggcctcctgtgtcaggaatcttgcaaccgccaccggggaggggtgtaatataataacaacagtcagaagtgacattggccataaacctccaacacatgccagctgaaaaccgggccttaacaagtccagtattgatgccctggacctgacactgtgttaatacattatccaaatgcactctctcatttgattatcaaaccactctgtgaggaaggtactttattttgtactttttttagatggagatttgctcttatcgcccaggctggagtgcaatggcacaatttcggctcacttgcaacctccgcctcccaggttcaagcgattctcccacctcagcctcccaagtagctgggattacaggtgcccgccaccatgcccgactaatttctgtatttttagtagagacaaggtttcaccatgttagccaggctggtctggaacacctgacctcaggtgatctgctcactttggcctcccaaagtgctgggattacaggcatcagccaccgcacctggccgatgaaggtactttattattttcatattagagaaggagaaactaggcctttgtaaggccaaagcttacaaagcaagttagaagctaagccagagcttgcactaaggcctgactgaccctggggtctagtccttaaccacagtgctgagccatcttcttaaacttgcacagttaatgtgtaactgaaaccacacctacccacgtgctggctgacaaattccaggtccttcaggcagcatgaatacttcatccttgaaaatttttctggatccttaaatcagacaaatgaacccacagtcctcctgcccatggaagacaccattagccttcccaataaggaaaattactgggatgctattttgacatactgagagtttttcccccagaatttcattgcatctcattcctttcttcctttccaaccatcaggccatttcttgttaactgcgtgggagaaagtatagaagaataagaaaaagcaagggagctgaagtaggccctactgatgctgcatccatgccccttcagtcctcgccacttctgggcatccctgtgcaacatccagctgccatgtctgcattcctttaccttagaactttctcctcccagacccaagggaggccaatgtgccagagaaataacttctataagcagctgtcatccaataactaatgcaaactggtagataaataccccagctccctcacctgtcaggtgaaataacttaggggcttgtattccccctttttatagaacaatgttctaaatttgtttcaagttttagattcaaggggtacatgtacagatgtattacatgggtatactgcatgatgatgcggtttgggcttctagtgatcccattgtccaagtagtgggcctagcactcaataggtagttttccagcccttgcctcccttccttcctccccagtgtctattgttctgctctttgtgtctctgtgtacccaatgctcacctcccacttataagtgagaacgtgcagtatttggttttctgtttctgccttaattctcttaggataatggcctgcagctgcacccatgtcactggacaggaaatgattttgttctttttcatggctgcaggaggcttgcattctatgccagctctcagaactccccagcaggattaagcagccactcacagtgattactggtttgatgacacacattttgctggctgctttctctgcccttccctacttctctaccagcacttcccagaaccacctcccaaataaaccttctcagagtctgctcctaggaggaagccagcctaaggcaggagtgatttcttcattctaagtcttaaagtttaagccccaaggaactcaaagcatagaataatggcaatcagaaacaacagtgtttcattctcagaactagaaaagattccttgattttggagaaagaaagccaggatgccaggaccttcagactttctgacaaagtgatgcttgtactctgccaccacttccccaccccctgttctgagccaagtagggagaaaagcagaaactgcagagagtttgggggtctctaagagcagattgacctggcttggcctctctagtgggagccaggcaggggccaggaaactggaaaaaacatcaagctgcatgggacgtctaggctgaccatgccaggcaacctcatggagcgctcatgagcacaaaaactccaaacacacagaggctcagaagcagggcgccctccaacccatggtggagggatatgtttccccatctgccccagatggcaggggcttggcacagggcttccaaacagatgaccagataggtcacacatgtctcatatcctggagaggacacctgtgtgcccgcctcacacctcggctgcactcctgaatttgcagtggttttgatcctcatcagactgacagtatcctgcctaagtgcacactgagctttttccttttctgcaccgcagcttctccaacactgccagcaggggaggagacaggcaggtgggaactcagccacaggaacacaggagcagcagagaagtgctggggagatgtcccatcctctagacaagcttccaccaacgggaaagagagcagctgggaacatcgacctcacataaacaactccaagaggccttcgccatattcctcagagcatcctggttggactgaactccagctgtctctagcatgaccaactcaataacccaccatgttctgaaccttcccagtgactcatttcctggagtcagctcccaaataaaccacctgcacacaagttcttacctcaggtctgctttcacgggaaacccaggtcaaatacatgctcagaagttaccaaatacacaaggatgatggggaggacctgttcccccacaccatagaagccccacagaactagatgcaacctctttgaaactgcaaaaaccctcatcagctgcaatttccataacccctaagaatgggacctcacaaaagaaattaagttcagctattaaaaaaaataggcagaactactcttgcatttcttgaacacatagaaacattacctttgacccaaggatgagataagaaagcagggtgctcatgctcctctgtccctgcaggccaggtggacaggcttcatggagaactgaggtgctgccgcaactctttgctcacaagtgaccatgaccctgatgagatgggcagcccgagactccaagtagacaatcaagagggcctttaaggacatcctccaggcagttctggatagacgaggctttagtgaaacaggcaggtcaaagggtattgctacttccacagtgtaaaaagccaaccaggtgctccatttctcttggctcctgtccagagtctaaagcatgagctcatctcagaagcccacgttccacatgcaaggggtcaggggtgcctgggttctgttcctgagtagctgggaccacaggcactttccaccatgccagggtaattattctatttttttgtagagatgaagtttccctatgttgcccaggctggtctgaactactggtctcagggaatcctcttgcctcagcctctcaaagtgctgggattataggcattaaccacagcacccgtcctgagcctgcatccttgaagacattgttaagccactgacttaattctgtcattttcttatatctgactgtcttgttataggataatcggccctgtttttaaagatttttattgagatttcacttttatctgtgatcagtaagtgaaaatggtgttttaagtaaatagagcttttgcaactactagagttttcataaactaagtattaagaacaactgtatgccatttcaatctttaagaatgaaatataccataaaaattcagtaatctggcctcttctagcctgggaggatgctaggttactgggttttccaggtcagtgaaagatactgtcttgattctcccaaacaccctaatttcacagttataaatttaaagaaaaaacaaaatctgtaatatacttgaacagaaattcccagttttcatggaaagttttctgtgtaacatttattataactacataattctatttattttgaagccctaaaagtttaattattttttaatataaaaattattttaatataaaagacattcaattgctaaaaaatgttactttaaaacaactttcaagcctgtggctaaaccaatcatttgaagtgctcttcctggcacatcctagcaaaagccaggatcacgatgttgattatgacaagactttgacccaagttgtcacaggagtagctgaggatgaagcagtagatgaggtcactgggctttgactctgccatgacaatctgggtggctttaacctctctgagctgactgtgcatttgcaaaatggtctcattagcaccacctcttacagctacaggagagagagagagcacgcatggaagatgcaaagtggtcagtagtttcatggcacacagtgagggcacagcccatggtgaatgcaattgatttttaaccatctctccatccatcccctgtggggccttcctttgcacctccagtaaccattgcttcctcctttctcaagtacacagcactctttgcaaatcacatacctaattacgtctaacatcttcctgatggtctctatccatttcctgtgtttcaatttcatctccaataacactagaatctcccagggcaaggcccattgcacaccccgcctccaacatcctccacagcacctcagtcagtgccaggtgtgcaaagtctgcctggataaattctcccctgactccttccccggtgggcggggggatgtgggagaggtgtcatgggaagacatttctgtctcctgaataacagttactgggtctacgtgaattcttcttgggatagtttccaatgtacactgcaggaaactacagaatgaatagtatctttaaaaaaattctttcttcatatggtatatatacaccatagaatattatgcagccataaaaagaatgaaaccatgccctttgcagcaacatggatgaagctggaggccattatcctaagcaaactaacacagggaaagaaaaccaaatgccacttgttctcacttataagtgggagctaaacattgtgtacccatgggcataaagatgaaaatagtaaacactagggactccaaaaggcgggaggaagggagggagttgagggttgaaagattatctattggatacaaagctcaatatttgggtgatggatacaatagaagcccaatccccaccaatatgcaatatgcccatgtaacaaacatgcacaggcacatgtacctcctgaatctaaaattaaacataaaatgcattcttacagttcaacaacaaagaaggtgcccttttctgccttctcaccatgtctcatagttccagctgtgtggctgcatctgtggagggaaggtccctgaggcttcctgaagacccttgagccctggctataacagagactgtggctgaaatgttaacagtgctacctgtcaggctccaatgccaggctgctgggggtggcaattggcctcttcaaagctcaggactcaaaaagaaaggtagaaggatgctctcacctgctgtggaggacatctgcttgttttggtcattcagcctgattagggcactttgattttctttttgggatccacatctccccttctcacccatgtggtggggtcttctctccttacatgtccagaaagcccagaaatacatacattacccaatacaagccagctgaactcaatgccagggctttagtatagagaaacattccttattctgtgacctggagcttgcagaggtcaccacatggacagaggcagcctgtgaataaagccagaatgcaggaagcacaggagagagaaagaaccaaagtagcatcagacttcctggagtttttagttaagttggcaatcagattctctttcatgctttatttttcttttcaatttcaacttttgtttcagatacagggggtacatgtgcagggaatattgcatgatgctgaggtttgggtatggatcccatcacgcgggtagtgaacatagtacccaataggtagcctttcaacccatattctcctcccttccttccccccaagtggtccccagtgtccattgttgccatgtttatgtccaaacgtgttcaatgtttagctcccacttacaagtgaaaacatgcagtgtttgggttttctgtttctctgttattttgcttaggattatggcctctagctgaatccatgttgctgcaaagggcatgattttattcttttttatggctgtatagtattccatggtatatatatatataccacattttctttacccagtctaccattgatgggcccttgggtggattccttgtctttgctattgtgaatagtgcagcagtgaacccaccaaggcatgtgtctttttggtagaatgatttattttcctttggatatatacccagcaatgggattgctgggtaaaatggtaggtctgttttaagtgttttgagaaatctccagaaaactttccacagtagctacactaatttatattcctgccaaaagtgcataagtgttcccttttctccaaaggctcatcagcatttgttcttttttgacttttcatttttttcaatttttttgacagagtctcgctctctcaccaggctggagtacagtggcacgatcttggctcactgcaacctccgcttcccagattcaagcgattctcctgcctcagcctcccgaatagctgggactacaggcatgcaccaccatgcccagctaatgtttgtatttttagtagagacaggggtttcaccatgttggccaggatggtctcgatctcttgacctcgtgatctgcccaccttggcctcccaaggtgctgggattacacacatgagccaccacacccggcagttttttgacttttagtaatagccatactgactagtgtgagatggtaacaaactgtggttttgatttgcatttctctgattactagtgatgccaactcttttttcatacatttgttgtctgccttcatgtcttcttttgaggagcatctgttcatgtcctttgcccatttcttaaggggtttatttgttacatgcttattggtttcatttccatatagattctggataggggtgccttgtttgcaagtatctcctcccactctgtaagttgtctgtttacattattgatagtttcttttgctgtgcagaagctttttagtttcattaggtccaagttgtcaattcttgtttttgttgcaattgcttttggggacttagccaaaaaaattttgccaaggcctatgtcaggaagagtaatttctaggttttctgttaggattttcataattgtaggtcttgaatttaaatgtttgatctattttgagttaactttttatatggtgaaaggtaggagtccagcttcaatcttctgcatatggctagtcagttatcttagcaccatttattgaatgaggagtcctttcccccattgcttgtttttgttggccttgccaaaaatcagatggttgtaggtgtgcagcttaatttccgagttttctttttcgttccattattttatgtgtctgtttttataccagtgccacgctgttttggttactgtagctttatagtagaattgaaagtcaggtagtgcaatgcctctgggtttattctttttgcttaggattgtttatgttatttgggcttctttttgcttccatattaattttataatagtttctctaattctgtgaagaataatgatatagtttgaattttaatcccccatgttgaaggtagggcctggtgggagatgtttgggtcatgggggcagatctctcatggcttggtgctgtactcagatagcgagtgagttctcatgaaatctggttgctataaagtgtggcatctcctctcccactctctctcttgctcctgctttcaccatttgtcacacaagctcccactttacattctgccatgaccaaaagctccctgaggcctccccagaagccaagcagatgccagtgccacagttttatagcctgcagatccatgagccaattaaacctcctttctttacaaattatccagtctcaggtattctttatagtgatgcaagaatagcctaatacaaatgacactggtagtttgatagaaatagcattgaatctgcaaattgggcagtgtgaccatttttatgatattgattcttccagtccattagcatagcatgtttttccatttatttgtgtcatccctgatttctttcagcagtgttttgtggttctccttgaagatatctttcacctccttggttagctgtattcttaggtatttcattttctttgtggctattgtaggtgggattgtgttctggacttgactcagtctggacgttgttgttgtattgaaatgctactgattttcaaaactttattttgtattttgaactttgctaaattgtttatcagctctaggagtctttaggattttctgggtgtagaaccatattgtcagtgaagagagatagtttgaatttttctttttcttttttggatgtcttttatttatttttcttaactgattgctctggctaggacttccagtactatgttgataggagtggtgagagtggacatccttttcttgttccagttctcaaagggaatagtttcagcttttgaccattcagtatgatactggctgtgggtttgtcatagatggctcttattattgctagatatgttccttcgatacttgtctgttgagggtttttaccatgaagagttgttggattaaatgtttttatagacagttttaaatgtattatacactattggaaagggcttcctgacacttgctgcttaaagcatctgagtaacagacttccaaacaaattgaatagagacttcagctaataccaactcattacaaaattatcctttttttgtttttatagtaatcttctatacatcatctcatttcacccttgaagcagtaagtcaggaacttgagcccttattttacagatggggaacctggggccaagaaagtgctatgagttgtgcaggatcccttggtgtaggtcaaaaaaccagctccactgcagagctgcctgtaccaggctatgttcacctttgtaacttctacaaaacatcaccttcaagctttataaggtcaggataaatttatttcctatcagtaacactacttaaagcactgcttttgtattatggctactgtgtcagtaaagcacaggtgaaatctttttgcaaaccagctcccttccccaacatactgttctcataactgtatatgctctgcaatgcttaattcactgatttcatgaactcgctggaagaataagaggattagtaagagattagtttagataacttgaatctctgtagaaaaaaaaaatcacagtcattctttaagctcctgaagattcagcatttggggagggagagaaaagccgaatatctgaccaacactatgtttcactaacattcttggctttaaatctgcaaaacaaaaggttttacaaatgttaggctaattgttaaatgtgttttgaactttccagttcaaaagcagtcttcagataatcatttttcctaggttttggaagctctgcatgcttcaaaaactctagaagtttaatcaataatgtggatgtcaatgttaattaccctcacacacactagactagtcaggataggctaggttttgctgtaataacaaacaaccctaatatctcagggctcaccacagcaaagctttagtttttgattactctccaggatggtttggttatgccaggatctctgctaatactgaccactcttaaacccatgctgactggaagtgagttttgagatgtgcctctacagttgctccaggaggagaaagaacaaagtgaatcaagcacgagttcttaaaacttccccccggaaatgacacacatcatctccacaggcgcatcattggctagcaaatcacatggccaagtccaactccaaaagggcagggaagttaacctgccatgtgcctggaaaggggaaaagacagcatacagagcttaacacgtgtgatcctcacaactctacaagacaggagagccagaggtgattatttctatattaaatggggacaccaacaacagaaagacccccatgttataggtagagaacttgggtgtcctggctctgtgccaagttttcttttcaccatatcatcagaatctggagttcccagataccaactgcttgagagcaagctagcaaagagacacgaaagtcagtttaaaatatatcctggaaagtttgagttgtgataactgatggaatatcaaagttggataagatgatggaagtgctgcctggaaaccacttggactaggtgatatctaagtatttcaaggagacacaataagaatggagattttgcagaaaaaaaaaaaagaatggagattttgaaagagaaaaggaggtgaccggggcctccagtccccttgccaatcaactcagaggtgttttgcattcacagttttctatactgggtttcagcacaacattcatttgaagaaaatttccttcaatttaattatattaaaaatgaaaaccactgactgcagtccaagcactttgttttgcagatggagagagtgaggcttaaagaaaggagataacttccgcacgaggacagagtggcagggctggagccagtcatcaaatagacggggtctggactgagagttggaagcccaaggacctggtttcaacactctgctgtgctgccacaggcaagccactccacgtctctgaacctgtgtccttttctgtccagtgagcacagaatgtctgtcctgtcaaatgcggctagaaagcagacatagaaagataattttacattgagaagacttcaaatgagaataccaacaaatatttgtttctcactattaaattagtaacttaaacatctcatttctgatttctagccagcacgtggagaattggttcatgtgaagcagcatgtgtgctgcttactcagcctctttgaagaacaatttaaaaataaaaattaaaagccagctgggcgcggtggctcacgcctgtaatcccatcactttgggaggccgaggcgggcagatcgtgagttcagaagatcgagaccatcctggctaacatggtgaaaacccgtctctactaaaaatacaaaaaaaaaaaaaaatagcggggcatggtggtgggcgcctgtagtctcagctactcaggaggctgaggcaggagaatggcgtgaacccgggaggcagagcttacagtgagcccagattgtgccactgcactccagcctgggcgacagagtgagattccatctccaaaaaaaaaaaaaatcaaaagccactagaaatgttcatagcttttgatctaataattacagttccaggaattcagtctttgggggaaatcttaaacaccagaacctatgtatactaaaatgtccctcttaatattatttagaatgacaaatattgaaaaatgaatgaaatgtggagtaaaatgtgataaatccattgaaagttagactatggagaatataggaaaacataggcaaatgcttaggatacaatcaatattaagtgaagaaaccaaggttcaaattgattgtagctatataataagaaagggatacacatttaaaagacaacacagactaggtgtggtgactcatgcctgtaattttagcacttttggaagccgaggcaggaggatcccttgagtttgagaccagcctgggcaacatggtgagatcttgtctctataataaataaaaatgaaaaagactacatggatataatgggttattgttttattttctccttttctctattttataaactttctggtatgcaaatatattgattttattttaaaaaataagtacaataaaaatatttccaatatctgccctgctgtgagggttaccagcagaaacaaattgtacaactggtgtgaaagtattttgtcctcattaaaggtagtctgtggttaagtgatcactatgatcagtgttaaattatgtttggttccaacccactcactttcagttgaacactgctattctattccttatttttctggaattgaactaagagaacaagagggcagattctcacccaatttcatatttaattaagcttttaggacacatttctctcttgtaggtttgatcaactgaaatatactagaagcttatccttctgtagaacgaaatacaggagataattctttatggttacaatgtctttgagtaaacggacttgagtgagaaacataggcattcacagctctgtgaagaagcacctccaagaactttccccatcagggccagtgtattcatccgcactcagcagttgcttcctgaaatttgaaatgagtcaagatgctcagaatggcctccatagtgtggggcaaacagaaggagtttagcagcaagcttgttacagctcactggctcccagagcacggctgcccatccttccccggagccgcctcactccagacatgggctctgcttttcctccctgacccgccaatcactcttccttttgcttgcaagcagctgaacagctttatttgtgtttctcatcacagttttattttcacttcaataattctgttcaaaaattatccaaatacttggtttttgccatatgaataggcgagcccagaaaagaggaaaggcataaacaagtgtccgcttgtcatttacaccaaggtacagttcacactgtttcaaatactttacccaaacacagtctaagagattgaagcactgattttcacacacctacttaaaatttttaggaaaatggagcagatagcacacaaaccagtaagtcagctaactagtccacaaatatgcaccaacctacatgcccggtgctgtgccacaggctgtgtgacaatgcatgctcttcacctgctgacagtttgtagttcagcaaaaaaatgaaaaagtccatataagataaaaaataataatacagtagcactggcatccaaggacaagtcaaagtgtcagaaaagatggggctggaaggatggtggaaggctttctgaaagaggtgggaatggaggggtgtgggcagatgggaagagtttggctgaacagagaggatggggaacggataaaatgtaaggacaccctgcagaaacagaggtgggtgtaagcacaggaagtggaaggagctgctggggatagtatgcaagttaaatgaagaagctcaggagagtggaacggggcctaaatacccttgggaatctctttttcagatgaaatccctgacctcagcttatgtttgatgctaggagctgattcgtcataccaagaagcagtgggaggatagaggcactccagccttaaaagccaagagacaaggagcacccaggacgaagagaagcgtgactaccaaaacgcttgctggtgcaatgagaatctgtgtccttcaccagagctgtctcgaattatcttgaaattgcatccatcatccaggccatcttcctgcaggcaaaggggatagaagctttctgtagccctcaccctctccagcctcccagactcctgtcttcctcagggggaattaagctcgccagacacagcagaactagggagacttcagagaagtgaggtctctcaaccaaagaaagccctctgaaaaatgcctcttactctgacttaaatgaagagcgagtcgcataaaaccaaagctgaaatcagggatttcatctctgaaagaagtgctcaggactattttgacccacatttctattaagcccagtctcctttttgtttaaatttacacagcaaaacaaatccattaattttgctagtgatgaccaacagatcctcaaaacagaaagtgtttactgcagaagttttagagagaatttgtataacatgtttaaaacagtagggattaaatctaagttatctagaactccagacatttggaaagctcattcctacgtctgactcagggttaaagtgtggttccttcatgccaagctcggtgtctgctacaaatagtaagtcccatgagctatgaaagcttgggggtgagaaatgcgggtgatggcaataggaaatatcttggatcctattgttctttctggctacataggtcagagtcccagcaggaaatcatttatcccaaattttcctaataaataaatcactacttacagagatgtggagacagtggagagaacaaataaggaacattgaggtacccagagactagaaacagctgggagctgttgccagcccaaggacttcagaggccaaggggaggaattggtgttacctgagggcaagggacatagaagagggactgcccagaagatgctgtagatgtggggggcacagctgctgccaaagatatgcactggtcaaggaggaggctgggtaattatactggtcctttctctctcacaccctttgattctttgctagtagcttccactggtcaaatctaactagaagccagaaagaaggggactctcaggtaataatgtccacgagagtcagcctccagggcacagaacaggcagagactggagaaggataggtgtgcgggtgctaagagaataagcacatcactgttaggaaagctatttttaactcagattctacaaagattagtattcttattgccaaggagtcagcagaattttgctcagcagaactttgctcagaagcaggacacagaagacaagactcagactccagcattctctcaaagagacgagcgtgcacacatgcacatgggtctgcacacacagtttcaagatggattttcataatgaaagcagaaggaatataaaagttagcattctaaatatggaagaccttagcattcttttttcaccccaccccagaaaattggccactacaataataccctcagtcagaagatccaaacagcttttctgggaaatccaaccatccaaagagaaagaccttaagatatagacatagagatgcccaaccaaaatgacccagcctttaatggaagccactgctgttcactaaagtctaagcgcagaaagtatacctacacataggtttagagctctctatcaccattttggtcccccaactattaaacataaacagacagccaaagctcaccagacttttgagagaatacttctaatattcatgaaaaagaccaaaacagaaaaaggcaactgagataaaatagtacgaaaggagaggaaacttccaaaaaactataattaaacacaaacagatcaagaggagagaaacccttagagagcaaaagaggtatcttcagaaagagaaaatatgactgcaggggaaaaaactcaaaagatagaataaaggagaaacttgaggaaattgtccaggaaatagaacataaagaaatgggaagaaaagagaaaaaaattcaacagaccaaataataagaatcctcaaaggaaaaacagataatacagtgaaagtcataagtaaaatcaagcaaatcttagatctaaaggactcaagattctaatttgaaaaggtgctaccaacagcccagcacggcagataaaattagcccacatgaatgcacatcattatgaaatttcagaacactgaggcaaaagatcaaaaatttttccagaaagggagtaaaacaataaaagtcatatacaaagatcaagtctcagaatagtaaagaccttctcaaagccacactgaagaggaagacattggagaaatgccttcaaaacatggaaggtaagttattactttttttttttttttttttttgagatggaatctcactctgttgcccaggctggagtgcagtggcgccatctcggctcactccaacctccacctaccgggttcaagtgattctcctgcctccgcctcccaagtagctgggattacaggtacccgtcactacgcctggctaattcttgtatttttagtagagacagggtttcactatgttggctaggctggtctcaaactcctgacctcaagtgatccgcccaccttggccttccaaagtgctgggattacagtcatgggccactgcgcctggccgagggtaaattatttttaacctagaattctacgcttggctaaattattattaaaacatagaataaagctattttaattcatgcaagttctcaaaatttttacatttgatgcactcattctcaggacatgctctgataaaatgaagttaattgagaaaaatggaagcctttgtaaacagaagatgcaggcctggtgtggtggctcacgcctgtaatcccagcactttgggaggctgaggcaggtgcatcacctgaggtcaggagtttgagaccagcctggccaacatggtgaaaccctgtgtctactgaaaatacaaaaactagccaagtgtggtggtgggcacctgtaatcctagctactcaggaggcagaggcaggagaacctgggaggcggaggttgcagtgaaccgagattgtgccatcccactccagcctgagcgataagagcgaaactccatctcaaaacaaacaaacaaaaaacaaaatatgcaacacaaaggggaagcggaggaaatccccgaggtgtcagatccactccaagagtgcactggcaggagaggcagctcatccagaggaaagcaggtggagggctcaggaagagatgcctcataaagatggaatggatagactctccactgtgttaaacataccaagaggagactatacaactaaaagtgagttgggggataatttggttataaccaaattatagcttaaaaaatgttaaaaagtagtattaattctagaaaattaatgagttatgtaccaaaagaaaaataatcaagatgccacatagtttagctgtgcaccaggcttaatcgtcatttaatgtaaacactgaatggcgacaaaccaaaaattagatctccatagcgacagaatggaaaataagacatatgcaaagatacagtgataaaaaggaaacacgtggaagacagctgaattatcatctttgatagtgagaattaaatagataatactaagtctgagaaattaatataagcattttatttagagatagggagttaaacactcaaagagtccatgaaaagagttaccaggtcttgcctctgtgtaacaggagtaaaaatgagatgtctggtgaatttcttatttaaaaacaagcctcgtagaactatttgactctaaacattgtgcagaaacaccttggaaaaaaattaaacctactttttaaaaatgggtttaagtaaatagtcagacaaaccccaattaagggacattccacaaaaagattggtctggactcctcaaaaataccagttgtacaattattatgcctgaattgtaaactatttcctttaaatatcaattaataaaactcaaagaaaggctgaaaaattgctccagattaaagtaaactaaagaaacatgagaactaaatgtcatatatgatcctggactagatcctggaatagaaaaaaaaggtgatttaaaaaacataattgagacaattcaatgtgacattttctgaattttataactttacaggaattaggtaaaagaatgttcttgctaaaaaaaaaatacacactaaaggtgaagaatgatgttatatgaatttactcaccgtttaaatatatatggcatatgtcaggcactgtatggtttatatcccatgcattgcctctgtaaagtattacagcaactgcattaagtactttctacagctacttctatttcacagaaggggaaaatgaatcttagagaagctcagagaaacaggaagtgacagagccaagactagaaggtgaatctatttccccattttctccattatcctttttcatttttaatgaactttcgtttttaaaacaattttagatttacagaaaaattgagaagatagggatgataaaccaagttacattagcaaaaatggtgaaataggagttccaagcactccatctcacagaaatgtaaatttaaacaaccatgcgaatgagaaaataacttcacaaaaatgaaggaattcaagtgtaaagattatagcacctgggtgaagcaaagacataagaaaagatgcatgaaggtgagaaggataggttcatatcacttgtgtcaaccctccccaaagcctgaacagcacaacacagagatggacgccatccaaatgggaaagaagtgagcatctgacttcacctccacatcaggcccgcccagtagacccgaggaccaggtcagctgcctccacatcaggcctgcccagtggaccctgggaccaggtcagcttccgtggaactaggctacaggccagccccaggagaaccaacctccaagcccatcctagcaccaaaccaaaccctgcaaagccaggctataccatgccctgtgaaccctgcaccaggccagccctcagatccagtctccaagcctgtcactatggactcaggccccagatccaccccagcaccaggccaccattgtccccggacccaggccagccccatagacccaggttccaagtgcaccttctcagatcaaggctccagactcacccgcactgactctggcaccaggctaggccccagagaccttggatacaggaccactccaatagattcccatgctgagctggcttctgaagacccaggccctaggtctaccctgcagactcaggatccaggcccacccgaattccaggccagtccccacagacccaagctccaggccaaccccagcagacccaggcttcaggctgccccaccccaacagtcccagacaccaggctagtacctacagacccaggctttaaggcctgcttctatagtcccaggcaccaagcccactgccacagattcaggatccagactcaatcctgcagacccggtagccaggcccatcccagtgtactctagcactaggccaaataccgagaacacagaccaacacctaaaaaccgaggcaccgttactgctcacatgctgacccaggcactagggcagactgctcaaggactccatcagcaagcccaaccatggaccacatcaactgtcctatccagaactctggacaggctgattagtgaagaacttttcctgctgaagccagtctgtaaacactggaagaggtgacttcttgaaatgtgcagataccaatgcaaggccacaacaatcacaaataatcaagaaaacatgacaccaccaaagcaacaaaatagagcaagagtaaccaaacctaaagaaatgaagacatatgaactgctagaaaagtttcaaaattatcacattttagaagcttggtaagctacaagaataacagacaactaaacaaagtcacacaaacaatacatgaaaaaatttctaatttcaacaagagacagaaacaaaaaaatactttggaactgaagatcacaatgactaaacttttgctgtcaagaatcccacagttggccaggcacaatggctcacgcctgtaatcccagcactttaggaggccaaggcgggtggatcatgaggtcaggaggtcaagaccagcctggacaagatggtgaaacacagtctctactaaaactacaaaaattagccaggcacagtggcaggtgcctgtaatcccagctgctcgggaggctgaagcaggagaatcgcttgaacctgggcggcagaggtcgtagtgagccaagatcacaccactgcactccagcctgggccacagagtgagactctgtctcaaaaatgaaaagaaaaagaaaaagaatcccacagtcatcacaaatgccgagcccagctgacatagctgcctggaatgtacactgcacactgcagtgttccttccaaagatggagccacttctgtgtctcttccctgggcctggagctgctactgtgttgaatccccacccccagctactactgtgttgaatcaccacccccaagtcattaccacacccaatgatctggaatgaaaacaccacagcgcctcaccatatgtgaccaagttgtgctgccctgcacctcactctggggcctgtctctcggctgctgtctgccatcactggtccatgctactgctgctctacccatcccctggaaactgaatcataactttgaactaccattatgaagccccctgggtcatgagtcacagctctgactagccatcactaggaccttgctgcagcttctctgcatcccatgcccacgggtcagagttgtgactgcaacctgccatccactcggctgcactactgctgtgccttacccttcggtcccagaccaccactaagccctgtcaccccatggcctgtgacactgctacatcttggttcaccagtgctgagtcaccatggcatgctttggagacaaagactccatggacaatcttcacgcacctatgcatcagacactgttcccagttccacagaaaatatgccactgccacaggccctgggtgccagggtagttctgtatgtctctgagcagtaaacccaagaaagagtgggatgatatattcaaacactgaaggaaaaattgccaaccacaaatactttatatggcaaaattatccttcagaaatgaaagaaaggtagactttcctagacaaacaaatgtgatattgagagattatgaccactagatgtacctttcaagaaagtctagagttttcaagctaaaacaaaaggacacaaattagtaacttgaaaacatatgaaagtataaagtttactggtaaatgtaaatttattgtaaaaataagaataatactgtaatagaagcatgaaattcacttttaattattttcttaaaagacaaaaatatttaaaataactgtagccacaatattctgataacagatacacaatataaaatgatgtaaattgtaacatcaacaacataaaatataatggagactagtaaaaacatagagctttgtatgcaactgaggttaaattatcaacttaaaatagactgttacaactataagatgttttatgtaagcgttattgtaatccaaagaagatactgtactagatacacaaaagataaaggaatcaaaaccataagggataatgtcatcaaacgacaaagacagcaaaaaagtatgaaagaaactacaaaacagtcagaaaacaattaaaaaaatggcaacagtaagtccttacctatcaataattatctttaaattaagtgcattaaattctccaattaaatgacatagagtggctgaatggataaactaacaagatccaactatatgctctctacaggagacacaatttatcattaaggatacatacaggctgaaagcaaagggatgataaaacatactatgcaagtagaaattttaaaagagcagaggtggttatataagacaaaatagactttaactcaaaaacggtcacaacagacctagaagatcattatataatgatagcatggtcagttcatcaacaggatataacaattgtaaatatttaagcactcaacattggagcacctaaatcaataaatcaaatattaacagaactgaaagtaggaatagaaaacaatacaataatcaaaggagaactcaataccccactctcaacaatggatagatcatccagacagaaaatcaataaagaacttcaacaacactatagatcaaatatacctaacagacatactcagaacttcccacccaacagtagcagaatacattcttgttgagcacacatggaacattctccaggacagatcatatgttaggccacaaaacaaatcttaccaaatttaataagtctgaattcacactaagtatcttttctgaagtaatggtatgaaaccagaacacaataacagaagaaaaactggaaaatttacaaatctgtggaaattaagtaacatacttctgaaaatcagtgagtcaaaggagaaattaaaagaaaatgcaaaaactatcttgagataagtgaaaatggaaacacaacatgccaaaatatacaagggacacagcaacggcacttagagggaagtttacggtgactaacacccacttgaagaaagaagatacatttcaaattaacaacccaacgttatacctcaaggaattagagaacaaagaaaagctaagcccaaggtaagcaaaaggaaagaaataataaaagtcaaagcagaaataaaggaaatgaagactagaaaaataacaggccaatgaaagtaagagatcggtttttgaaaagataaacacaattgacaaaacgttagctagactgaggaaaaaaagacaaaattataaataaatataagcatatataatataaatataaatatatataatttattttatataaaatatatatttatatgtatatatatttatatataatatatttatattttacatgttatataaatatatttatattttataaatatataatatataatataaatttatataaatatataaaactgatacgacagaaatacaaaggatcaaaacaggctgctatgaataattatatgtcaacaaattggataacctaaaacaatggataaattcccagaaacatataagtaatcaagactgaatcatgaaaaaaaaaatcagaacagaccaacagtaagtaaaagataaatcagtaattaatacgtttccagcacagaaaagcccaggaccagatgacttcactgcagaattctaccaaacacttaaagaataattaacaccaatctttctcaaacttttccaaaacactggggaggtgggaacacttacgtatacttttaatgaggccagcattaccttgatagcaatgccagacaaggacattacaaaaaaaaagaaaattagaagccaatattcctgcaagaaaaagggggggagtttgtctgtcccttccatcacgtaaaaacacagggaaaaagcaccatgtatgaggaagaaggcccttaggagacaacaaattcttctggtaccttggtcttggacttcccatcctctagaacaagggtccccaacctccaggccatagaccagtactggtcacaaagcaggaggtgagtggagggcaattgagcaaagctgagctctgcctcctgtcagatcaatggcagcattagattctcataggagtgtgaaccctatcgtgaactgtgcatgtgcgggatttaggttgcatgctcctaatgagaatctaatgcctgatgacctgtcactgtctcccatcacctctagatgggaccatctagttgcaggaaaataagctcaaggctcccactgattctacattatggtgactatgtaataataacagaaatagaatgcactataaatgtaatgcacttgaattatcccaaaaccttcccctccctagtctgtggaaaaatcgtcttccacgaaaccagtccctggtgccaaaaaggtttggggactactgctccagaactgtaggaaataaatttctgatgtttataagttgcccagtctcaaatattttgttatagcagcccaaatgaactaagatagacttcaatcaacatttcttcaaaaaagacatacaaatggcagcagatatgtgaaaagataaccaacatcactaatcatcaaggaaatgtaaatcaaaaccacaatgatatgtcaccacacacctgtttaaatgactattatcaaaaagacaagtattggttaaccccaggcacattgcctatgagttagccctactttggaaaaaaaaaaaaagaaaagataagtgttgatgaggatatcgagaaaaaaggaacctttgtgcactgttggtagaaatgtaaattggcacagacacaagggaaaatgatatggagtttccacaaaaaaaaaaaattgctaatagaactaccatatgatccagcaatcccatgtctaggtacatatactaaggcattgatcagaatcttgaagatatattagcacttataggttctttgcagcactcttcacaatagctgagacatgaaaacaatgtaaattttcatcaatggaagaatgaataaagaaaaaatgtggtatttacattcaatgaaatattattcagtcttaacaaagaaagaaatcttgccattggtaatacatgggcaaacctgaagcacattatgctatttgaaataagccaggcaaaaaaggacaaacactacatgatcccacttatataagtaatctaaaatagccaagctcacagaagtagagagtagaatgacggttgccaggttggggtggaggggaaatggggaagtgttggtcaaaggatacaaagttgcagttatgcatcatgagtaagtcttggatttctattgcacagcatcgtacctataggttaacaattctgggccgggcacggtggctcacacctgtaatcccaacactttaggaggctgaggtggacggatcatgaggtcaggagctcgagaccagcctggccaacatggtgaaaccccgtctctactaaaaatacaaaaagtagccaggtgtggtggcacatgcctgtaatcccagctactcgggaggctgaggcaggagaatagcttgaacctgggaggcagagattgcagtgagccaagatcccaccactgcactccagcctgggacagagctagactccatctcaaaaaaaaaaaaaaatctgtattatatagctaaaagtttgctaagagtttagatttcaattccagcgttcttattaccaaaaatgaataaagaaagagagagggagatatgttttggaggtgatgtgtatatttatgaccactgattgtatcaatagtttcatgggtatatacttatcaaaaaaaaaacttgcatacattaaatgtgtgtggctttttgtatgtcagtaataataaagtagtttgtttttaatgtagcaaacaaaatccagcagcatattaaaagattatataccatgaccaagtgggatttatcccaggaatgcaaggttagtggtttgatgtattaaaatcaaacaatgtaacgcaccagtaggaggaaggcaaaacacatgatcatctcaatggatgtatgcattagtctgcttgcactgctgtaacagagcaccacagcctgggtggcttaagcagcagaaacatgtttcccacaactctagaggctggaagtcccaggatgacagggctggcagagttggtttccggtgaggcctttcttcctggcctgcatttgccactttctcactgaatcctcatgtggcctttcctcagagcatgtgcacttccggtgtcttctctgctttttataaagacacaaatcctattggagtagggccccattcttatgacctcatttaaccttacttactctcttaaaggctctacctccaaatatggttgcattgagggttagagcttcagactatacattgtgggcgtgagggggagagcaactaaatccatagtgatgcagaaaaaatgtttgatgaaagtcagtctccttcactatgagaatctttcacaagccagaaacaaaaggaaacttcctcaaccatataaagggaatctatgagaaactcacagctaacatcatacttaatggtaaaagactgtaaaagattctgtgatcaggaataagacaaagctatgtgttcttgccacttctattcagcattgtgctataagttctagccaaggcaagaaggaaatgaaataaaaaaaagaaaggcattcaaattggaaaggaggaagtaaagtatctatgttaaccgatgatataattttatatgtagaaaattctagagactccatatgaaaactattagagccaataaactcagcaaagcacccaagttgcaacatcaacatccaaaatccagcttatttctacacacttgcaatgaataagccaaaatttaaggtaagaagacaattccattcattatgatagcatccaaaagagtaaaatactagaaataaatttaaccaagaaactgcgagatttatacactgaaaacattcaaaacattattaaaataatcaaagaaaatcctttaaaactggaaagacatcccttcttcacagattgaaagagctattgtcaagatggcaatactactcgagtctatcgatgcaatttctatcaaaatttcaacttttgtttgcagaaatagacaagctgattcttaaaagtatatgaaactgacagtaagcccaaatagtcaaaataatcttgcaaaagaagaaaaaaattggaggactcatacattccaatttcagaacttaccttaaggctataataattaaaaagcatgtagaataaagaataaaattgttattttacctcacagaaatgtatgtttaaaaattaattcaaaatggatcaaagatctaaatataagctaaaactctgaaacccctagaataaaatataggagtacattttcatgaccttgaatttagtgataaatttttaggcatgataccaaaaatacaacaacaaaagcaaagcagataaatctggcatgttaaaaattaaagatttttgtacattgaaaaataatatcaataaaatgaaatgaaaacctacagaattaagcaaaatatttacaaatcatgtgtctgataaggaattagtacacagaataaagagctcttacaactcaatgacaacaaaaaaacaacccaatttttaaatggccaacaaacttgaatagatatttctccaaagaaaatacacatgtggtcaataagcacatgaagagatgtctcacttaacaccatgaggcatgaggaaaatgcatatcaaaaccacaagacaccactttccacccactaggttggctctaatccagaaaagaaaggaaaggaaaggcaaggggaggctaggggaggggaggggagggggaacaattgctgggaaggttgtggagaaactggagccttcatacactgctggtgggaatgtaaaatgctgcagctgctgtgaacggcttggcagttcttcacaaagtggaacatggaattaccatttgaccgaacaattccactcttaggtgtacaccaaagagaactaaaaacgtatgatcacacaataacttgtacatgaatgctcattcatagcagcattattcagattatactaaatgtggaaatcacccaaatgtccatgaactgaggaatgggtaaacaaaatgcggtgtatctatacaatggaatattatttaagcattatacaatgtttaaaataagcaaggtattaaattctcatgtatattacaacacaaataagcctcactgaaagaagccagatattaaaaagccacatatttacaattccatatatatgaaatatccaaaatatgcaaacccgttgaaccagaaggcatattagtggttgtcaggactctgatggttgtttccttggaagatgacgtgggagatgagatgaactcttacacattgtcattcaccactttttgcagtaaggaccatttgttttttcttccttttttacaaagagactcaggagaaggctataaaccaggcagcgaatcatgcctcagcctcctgtcactattttaaacaacagctttgcaaacaaaactagaggttgagggtccactcactccacagcagcccacataaatgcctgggatgcaccatctcactcctgcagatgatttattgacttttttcatcatttgaataaatgactatatcacaagggctcctgaaaggttgctgattaaagtaccctctattgttaaaaacataattaaataatgtttggatttatcactttctttgtaaagatgagacataaaagatattagaatctcaaatgacacagttagaaagtcatccagttaatagtactctttaattatcacagctagccagcactgcagcatgtctgcaatgctttgttatttatggacattaaactgcaaatcaagttgtgaagctctcccctcttataagtagtacaaagactgttaaacaaaacagaatttaaaacagcatggagttataaatagcctgctgtttggtatagtttgtcaatctgttaccacttaacagctctctaattagcactcacttttgatactactgttcctaaaatgtttatgttggaagttacaaattactgtctaattataccggctactttgttttgcataaacaataaataaaatcccatttatgccataaaaatacatgcactgtcatcactttttctataggatgagtaataaactttgctagctttacactgaaaatcagcagtgaacaactttaattaaatttgacagtgtgaggattcatgactttacttctttaaggggtgaattgcttgcaagcaggaaaagtttgcacagaatcaaaagataccatcccagtagaataacaaactcagcatctaaattgcacattccagaaaaaaactttttttcaaattttcagctttttatcttttgccctgcaccaaggaaattggaatatttgtgcttctacagactcagtctgggtgaatcctaaaaatcagtgctagggagaatcagagcatgggagaaacctctatttgaggaaaaaataatcaaggcaatgcttttgataaaattcatttcttggtagatttacttaagttcttcccatgtcatgatgtctccttgtgaaataagccaaattaatcatcaaaaccaatcattctatcattgagaattcctcattcaaactctcctgttgtttatgtgaatgtggatcatattatttgttcaaaaaattcactgtttttactatgaaagagagggagtcgtcataggaggcttatacatcttacttcactgacagctagcatggtggcatgatttgctttaaccagtggaatgtgagcagccacgtctgaacaaaattttgagagccatcacgtggtctgtcatggcacatgaagccatgcatgtactagataaaggttgctccttctgtcgtggtcctggaatgaattgaacagagccacatcaacccatgatacatgtgagcttacaatgatgaaatggtggaagttatttgtgcctatagcataacttagcctaggctgactgatacattcacttaactgctatgggctacgttagcatttagtaaacatccaataaataatagatgaataaactaatagatagatggaatgaaagctgtaaaaattattacttaaattatatctgcatatgcaaatgcaggttctccatgtaacagaaaattattttacattacattgagaccagctatattgtctaaacacaaggcctacacatctatattttacccaaaaagtgaaagttgatccacacctgtattctctgattacagatacaaaatttcagctttttatcttttgccctgcaccaaggaaattggaatatttgtgcttctacaaactcagtctgggtgaaccctaaaaatcagtgctagggagaatcagagcatgggagaaacctctatttcaggaaaaaataatcaaggcaatgcttttgatgaaattcatttcaatacaaaaaattgtatcctatgtcagaggccggcttgttagtttcctttataacctggtcagtggtgacagtcttttcctaacaccctgtacaatcgttgcaatacatctccaacacaacagcactgtgcagtctcatcaatgtgtttcacacactctcttatgttggagacagggccaagtggcagctccaacacatctgcacaatgagggtcatttgaatttggaaaataatcagggcataatatagggcatagctgcctcccacataagcagtctcctggttcagcctgaaaacacaccattttggatttgcttgtatcctaatcgcactgacttatgtaagtacataaaatattcataccccatataaaatctcaaatcgcaatgtccctagcaatcttcactaagtgtcacatgttgtggaaattattcactctggtctgtcagtgttggcgaactctaccttgctggtagagttttgctggaatattaaatttcataactgatatgatttcatatactccaagtctgccacacaagccataactgagaccaatttctcatgaaaccaaaagccctcagcaaagcaaagcactgatcaacactgcatctctggctggacttgtctcagcattctctgcacggtgggcatagagcactgtagaaacaaggagccctttcttgctggtagcaggatgtgcagacaggcaagaccagctgtgagccatgatctgtcattctccctaaaacaagtttcaatatttcacagggaagggacaacattttttttctatccaaaatagtcatcctttcttctattactcccttacttataaaccacaattactgtggttgaagggatgaagtcacagtcagtcctggccaatagaaacttaaaggtcaaggtttccatgagtgcagggcaagtacagctggaggtacccacaaaatgtttaaacagtcaaattgccccttgtgaaggaactaaccttccttttctcccttcaacagatgcacagtgagctcccactatgttccaggcctctgtgaggtgctcaggtaaagcaaggagcaaagctgacatcgttcctgatgtcacaaacctgcaagttgagctttttctttactgcaagaggcaagtaaagaaatcttcacaaccacgagtgaacagcattgcaatagagaaatcacagggtgctgtggaagtgagagagcagctcttcaccttgtctataggacgggtcaggaaaggaaggcttccttggattagtctaaaacataacggatggctccaaggtagccaggtaaagagaaaaatgaaaggaagcttccagcaggagaaagagcaagtgtgatggactagagatgagaatgaccacgaggccaggagaaactgcagaagactgatggagaacgaaaccaagaagagaaatcggggaactgagcctgcagggcagtcaacaaagatctttgaccaaatgttgaagactttggggtatatcctgaaggcgatgaggagccatggaaggagtttcagcaataatcagatttacatgttaatcacatacctttggctacagtgtgagggacagcaggtgtgagtgtggaaagtctagttagggtgctgtattagttgtcattgccatgtgaggaattattccaaaacgtagtgccttagaacagcagcatttattgtctgtctcacggcttctatgggtcaggaatccgggggcaaatttcctggatcctccggctcagtcaccctcaaggctgccaagtgtcatccaggactgcagtcacctcaaggctccactggaaaaggatttgcttctaaattcaatcatggcagtttgcagctgttgggctaaaggcctcagtatctcactgactgctgatcagaggccatatgggagctgacagcacagctgcctatgacctcagattaaacaaggagaggagccagagggagagttggtgagcaagatggaagtcatggtctttcatagtctagcttcagaagttgcatcttgttacttttgccgtattctgttcgtcaggaacaagtcaccacacccaaaccaaactcaagggggagaatatgtcatgtgggcatgaattccaggagacagggatcaaagtgagccatctaaaatgctgcaaaccataagagctattaaaataactcatgcatgagatgctgatggcctatatgagggtagcaatagtagaaagacagaagtgaacaaatgataaatgaatcaaaaggatttggacactggagttagaagacggtagaagtcaagaatgattctcaggttctggtttgagaaagtaggaggatgattatgctacttgctgaaatgtaaacactcaaggagaaataaatttttggaaagaaattttatgcatcttgttttgtaaatattcactttgtggtgcttgtgaaacactgaagcagaattgtcaaataagttgttatctttccaggtctgatttggaacaagagaactatttgtttaaatgtatatattaaaatgaattctactcacttgttaatctggttgtacaaagccatggatgaatgaatggatagatggatggatggatggatggatggatggatggatggacggacagatggacagacggatggatggataaatggatggatagatggatggatagatgaatagatggacaaatggatggatggatgaggtgatgggtggcccatctggtccaaatatgaaaagaagatcatagcagtagtatccatcattccgtaattatctagtcagaaaagatatagatcagcccagaaaaatttttctccggttgcaatgtattgagattgtacaaatccttctgtccttcctttggatatgacacattgactatgacaaccacgttatggagctggtgctcaagccaaattttaagttgtcaagaatgtgaaagcacctgaaatgcaaaggacttgtatgacagctttcagttgcagatgtctctgaccaataagagtaaacaggataggctcagaggattggagttgcaaaatcaagggccatttgccttccgagatccagaaaggtctctcaggattaattgattttgggatatgaagtctggtctcactaaaaaaatgcaggtgtatgacgggaatcagttaactgtgttttagttttattgttcaatgacatctgtttgttgtagcctcccatgaatgttcatgagacataactctgaaactttattttatgacaaagccaaaagatggcaaggcttttcagaaaagccttctgcgaaaacaggtagaattatcttgagcgaacagatcagtcctagcaaatcctggtcttattcatattaatgatggtaggccaggcgtggcgactcatacttgtaaccccagtgctttgggaggctgaggcaggcagaatacatgaggccaggagttccaggccagcctgtaaacatggtgaagccccatctctactaaaaatacaaatattagccagatgtggtggtgcacatctgtagtcccagctactcaggaggctgaggcaggaaaatcgattgaacttgggaggaaaagtttacagtgagctgagatcgtgccactgcagtccagcctgggtgacagagtgcgactctgtctcaaaaaaacaaaacaacaaccaaccaaccaaattaatgatggggggataaaaaaggaacagcatgttggaaacaaatgttcctgggtatccctccactaattcacacatagaccaaaatcctggatgtcattaatgtgcaagatggtagcagcttctttggccacactcctcctttcaggagctctggaaacaaagccacatccttttattcccatctacaaaaccaaaccaacagtcctcctttagttttttcatttcaaggttgtctataaatctttgctaaggagaattctggtgaaactgtcaatgaaggcctgactgaaaatcacaataatttcttctattaactaggggaaaaccagctattcattacggatggttgctaattaattttctaggtgcaattgttaattataacaagaatatattatacctgctgaaggtctggttgaagataaagtagtcaccagaatcctatgaagaacagcaaaatattaataattattaattattaattaatttagttaagtgatcaactaaaaatcagtattacatgtctattgagaatttacaatgtgccaggcatggctctaagcagtttacattgaactttacaaccccaccataggggtgggtattttgtacacaaggaagcagatgtactaaaggatgaagcagcttgcccaaggtgacagaaagagaaactgatttattatgggaggtagggtagaacacttcagagcactgtattttaacctttgtgttcattacaaaactcattccatacaacagtcctgcaaggcaggcagtggaaccatctcgtcttatagatttgaagctgaggctctgagaaaagaaatgactttcctaaagtcatgccgcagcaagagtgggatgcaactcaaacccagcatgaaataattcacagtccatgaccccagctgctggggatagtacatgaatggcaaaataaccattttccaacataagaggataagttctgtttaaggaagtttcaaacattccacaaaactcagcagtgaaagatgagcaagtaaagggaaaactaaagtcactctacatgaagaatcctttaagaagagaaagacgtatcacagtggtgtgagcacctcatcactgatagagttgggcccagcctgactggccttatgtggaggctgatgaaggagggattcttacatcaagaagaggttcagccatgaacctgaggtcctctccaaccccaggactccataattcacatagataaagctcctgtttctttaattcctgggagttttgttctttgtattttgcatttcttactgtaaagcgaaaaaaaaaaagcagattgggaacacaaattttcttaattttctaattttttatttttcagggacggggtcttgctctgtcactcaagctgcagtacagtggcacgatcacagctcactgcagcctggaatttctggactcaagaaatcctcctgcctcagcctccagagtagttgggggtacaggtacatgttaccataccagagtaatttttattttttaatttttttgtagagacggggtctggctatgttacccaggctggtcttgaagtcctggccccaagcaatcctgctgctttgacctcccaaactactgagattacaggaatgagccaccatgcatggcaaattttttttttccatttcaatcatccaacagaattagagatcaggttaggtgatatgaaaaatataaagaactaaacttcagtggttgaatctctaagaagaaaaacaagccctaacattagtaagagtcacatttgaatttagcagggatattttatttttcacctgccactgaagtgatctgtgtggcagagacagacacattgagctgtgagcagcatgggtggatggttcaatgcagactggatgtccttgggttttaggttcggtacttgctttagataaatttctttaaagatttttgtaaatttgactcaaggagatcatgcaataggaattcttttgctgagaccttggatgttagacacttggctcacagatcctaattcagaatgtaaaccacccaagtgctgtcagcctattcagttctgtgacatgagaatgctgtgctttgaacaccatgcttctttcttttctaagagcaagcttctttagcctgccaaactcatgaaacagattttcagcaaagaataaaagcagaaaataaaagaagttggcaatttgcacgtgttcagctcagtctccctctcttaccctatgcaggctgaacttccatgtttctggacacattggctcagggacataacactgcacttgagaaagatgcaatcctcagaagccactaaatagagacccttgtcatccatctaccaagtctatcaaccttgcagcatcactgcctcctctctttctgtcctcgtacaattgaggaaggtccttccacatctgtgcgaaaggcccactgctctgcttgagctgtgcacctcaaccccttcatcctcatgagggaccccactgactctcttgttctctgcccctcctgtatcttcaccaaccccttcatctttgtatatattctgttaacctgcaaaatacttcagtatcttctacctttaaaagaagaaactgtctacctcacacactccttcagagtctgttctatcctttccctcctcttcacagccagtcttcaaaaatatttgagttgtctacctacccacctctacctcctcccactcccattctctcctgaatccaccctgaattggcttcatcctcatgtctccatccaaagagctcttatcatgggcacaagaagaccatgtttctaactcctatgaccttttcttttttctttctttcttctttctttctttttctttctttctttctttctttctttctttctttctttctttctttctttctttctttctttctttcttatttctttctttctttctttctctctttctctctttcttctctttcttctttcttctctttctctctttctttctttcattatttttttttgacagagtcttgctctgtccaccaggctggagtgtgtgatcatggcttactgcagcctcaacctcctcatctcaagcaattctcccatctcagtctcctgagtagctgagactacaggcatgagccaccatgctcggttgattttttatctgttgtacagaaggtgtctttccatgtttcccaggctggtctggaactcgtgagctcaagtgagccttccaaagcgttgggattacaggcatgagttaccactcctagaccagtggcaagatttcaatccccgcttcacctggtctcttgaaagcatttgccatttttattcaaatgccttctattcctggcttctggctttccttggacctttcagtctgtgttcctggaacaccaccttcctcaccctcctttacatatagaagtgcctcccacacgtagactctctagtatctttgctgaattaattgacttgaggccatcctggagaatggtgcagccagtgatggagcaaaacacaaaactcactagtgtaagcttgggagtcagatctgggttcacggcccagctttcttcttaccaattctgtgaccttgagccgctactctctttccttatctctgaaagagagctaaatgataactataataggatttttctgagaatttaattaacactagaattaaaatttcataagggcagagatcttcatcttttttactcaatcaataatccatatcacctgcattctagaggtgttcagcaaataatacctgcacaccaaatctagctctctgcctgtttttgtgtggccccaaagctaagaatggtttttacatttttaaacagttggtgaggaaatgaagattatgtgatagagtcagtgtgtagcccacaaagtctaagatatttactacccacccttcacagaaaaagttgctgtaaatcctgacagaagttagatattcaaaaactattaaatgaatgagtgaatgaataaagtatgtgcgcatctgaagcactgagcagtgaatgcatggagtgtatgccactagctaatgtattgagtgctttcccaaaggacatgctgccatcatcatcactatcgcacacgtggaacttctccagaggaagaccactccacggctcccgatacttgatacttgtcagacaacctgctggaagatgaaatattcggaatacctcttggtctttctaatatcaaaccactcacttgatgctgctttaaaaaaaaactgtttactaaattgagaggttgttgtagttattttatatatttgacgaaaaaatatattttatgaataatttatttcaatttcactgctagtgactcaagcatgatgatgccttcttttttttttttttttttttttttttgagatggagtctcactctgttgcccaggctagagtgcagtggcatgatctcggctcattgaaacctctgcctcccaggttcaagtgattttcctgcctcagcctcccgagtagctgtgattacagacatgcaccaccacacccagataatttttgtatttttagtagagacagcttttcaccatgttggtcaggctgctctcgaactcctgacctcaggtgatccacaggccttggacctccaaagtgctgggattacaggggtggatgtccttactcttaagaacaatggtttctatgcactcaggaccttctgataacttgtttcaggcaaaagaaacccaaatgtgatggatggacatatatgatttttgatacactgcatccattctctgttctttggataatttttccctgttctcttgtaggaaatcaccctttcccactcccagtccatgaatgtctggtgggactgactctacccttgactgcaggagagggcatgggacacaggactgaccagccagtaagtcccattcctatggacatgaaaattggttaaagaacaggcatggcacgttcggagtcagagagagacaatgagactttagtgggccctttgggaagaaaagcatactctcttttccaccaggcttaaactggaaacaatgagggatttgagctactggcagtcatctaacaagtggagtttgttcttagagccaaaagagaagataatagccactgaatgaagagaacttgagcccagtgccttcatgggagcccctggatcaagagttcacctaactctagtcttttcagtcatcatgtgaccaatagatttcaacttcagccaaagccagggtgagttagagctgtttgctttagaggaataaaaaccaaatgatgcacctgtccagttcatcactttccattccatgcttcaagttagtcacccaaataagagaagcaggtagcttttgatgaagcaccatcaggaagcagccattccctcaagaaacatggtactgaaatcatcatgtcagacactccatgtctgtaagaggcctgctgcatgatcttttgagacagaatggcagaattttaaagacagatggaaccttaaagaagaccatatatttaggagattgaaaatccaaaagcacgcaaagccaagaaggaaatgtgattgagtgaagggatcaggaatgagagagcagcaacacaggtaccgtgaaaaatggcaaatgacactcagcctcagggaccaggagcgggaggcggtggtgggcacagggctgcctggggggcacccattcgcctacctgagcagcctctgttcagtgacagctgaccatgtcgaggctcaaagatgcaagattctatgtgaaagctatctttattttctcatattttaagcaatttttatttggttctattatttgtttattcatttcaatagctttagaggtacaagtggtttttttgtcacgtggatgaattctatagcagtgaagtctgagcttatagtatactgcacccatcacccaaatagtgtacattgtacccaataggtgatttttcatccctcatcctcctcccatgatccctcttttctgagtctccaatgttcattatacctctctgtttgcctttgcatacccatagcttagttccttcatataagtgaaaaatgtggtatttgttatttttattccagagtaaatttacttaaaataatggcctccagcttcacccaagttgctacaaaagacattattttgttatatttaatggctgaacagtattccatggtgtatatgtgccatgtgttcttgatccactcatcagttgatgggcacttaggttggttctgtatctttgtggttgtaaattgtgcagtggtaaacatacaactgcaggtgtctttttcacacaatgacttattttcctttttgagatgagggtgaaatgagagaatctctaaactcagtttctctgaaactcaggtctcctcaggctcatggcatgcactgttgtgacattataaaatatgcagggttggtctttgatatgtcttgtttatggtttgttttgccccaccaagtctcaagttaaaatttgatccccagtgttggaggtgaggcctggtgggagggtttgggcagtggagatggattcctcatgaatggcttgatgcccttcttgcaggagtaaatgggtcctcactcttcattcccaagagcactggttgttgacaagagctggcccctcctgctagccctcttacttccttctctcaccatgtgatcgctccacacaccacctcccctccatcttccactgttttcatctgaggccctcatagaagcagatgctggcaccatgcttgtacagcctgcagaatcatgaaccaaataaacctcttttctttataaattacccatcctcatgtattcccttatggcaacacaatcagactaagaaaaatcttcaaccctgtttcctagcatatgacccctaaatccttaatatttccaaagtgatgtctcttgtataccaatgaatttgctgatggctggcagccctaggtagcttcaggatgggtgtggtcaatggaaagaccgaggcacgactagacagtttgggattttcagccccactcccaacctccagggaggagagagaggctgaagaataagttgatcaccaataatttcttcaatcatgcctctgtaatgaagcatccataaaaaaccaaaaagactaagttcagagagcttccagagagttgaacatgtgaaggttcttagagagtggtgcactagtgagggaatgggagctccatgccccttcccccatgtatcccatatgaatctgtttagctgcatcttctgtaatattctttaaaataagctgataaacgagtgtttccctgacttctgcaagtcactctagcaaactaatcaaacccaaagaggggtccacaaaaaccctgacttatagctgggctgtcagaagcacaggcaaaataacctggggcttgtacctgggtttggaggcaggggctgtcttgtggtacagagccctcctcaccctgtggaacctgatgctctcttcagctaggctgtgtcagaactgaattgaatcagaggatacccagctggtgtctactgcaaactgactgcttgcgtggtatgtatggtgagggaaccttcacatatttggtcgtagaaatcttctgtgttgattgttgtgagtgggataagagcacaggaaaaacagttggtgtttttaacactcaactgttaaaaagtcatgcacctaaatgaaggattcaacttcttcaaagatgagtcataatttcctatttccaaacatagtcattgcaaattaagagcatttgatctaatttcaaagacctcagcaccaccctgggtaaatatgttaagtgagtcctagagaaaatgtggacactccgaaacatgagcttgcctctgattttaaaacaagcagcacagcaccagcacagcttagctgggatctgttcatctgtgcatagacaagcaggcataaatgaccttggtttttttcgagctgttcttcccaggggttcaaacctctaattaacttagcttctcattgtttatccaggaaaaaatccagaaacatctcctttatgtccattaaaccatccagtcttaggaagcatccaaaaccagattttagccctcctgagatgcccatgtccagaaagggatttattttaactatgaaacataacattccatttggtcctaattctctggcactataattttttggacacattgttactgaatatatttgttgcagatggttatgtaatagcaacattggagctcggcacataatcagtcatgaaaattgtgtccagctcatgaaataaaaatcagcaatgcttggaagtggggccagatacttctattaacttcctagacattggagggctgggaatttgctctaggtgttaatgaaaaggcagagaggccaaaaaaaaaaaaaaaaaagatttcctctcccttgggggtagtttggctcttcttcacctcttggaatatgcagagctaccaaaaaatatatacaattacaggaatacagagatagctgcctgtttacacagttaaagaaaggcttccctcagggtgcagcaacattgttctttaattttctctggccacagctgcctgctgttttactctgtatatagtcaagaatagattatttcatttctggaaaaagtaggatgatagactaagcaggggttccaccttgggaccctgggttcaagtcctggctctgcctctaactggcaagtcaccgaatctcatggagttttgaaatatctgataaactacatatggacagcttttattcaaataaatatgaccaggaaaaatctccctactaaatgcatctctccttagaaatcttatcacggttgtcattttataggtttttctgggttaatctttgatgaatgttggtccctatggcagacgttgttagtgcctcccctacagcctctcattttagggggttcaaccagtttctgtgtctctggttctgagaccttttattggaatcccggaaggcgattgtcttgcaggctataaatgctaaagaattaacagccagtggcagcagcagtagaccagttattctctggagttgatgtataaacaccccaatctcttaccctttgggaggaatgattctgaagtatgtatttttaaatatttttagcttcccatgggtttaagcttcagtagttcactgtggcatctggcttaatagcaccccctttattgactaccttctctttcctgtgtcactacaccacttctctaccagtgtcacctgaacctacaaagtaaactacttgcactggaatccttgcctcaggatctgcttctgaggcatcccagcctaatataggctttttcataagactttaagcctcaaaatcactgtgtatgacttattcaccatcatccaaagcctaccacagcatatggtaataggacctcagaaataattgaggaaaaatggaggaaatgtttattattgctgctgttgctgctgctgttattcagtgtgtaacacacaatcaacccttcactgagcagagtcaacaattcatctctgattcttggaaaaaatcaggtttagggattcctgtttttcattagtgaaaatgagaacagggttgggaatccaggtctttggggaaaggctgtcaggcaaaaggtcagaatcccagaggcagaggggatttgatctttagtgtgagagcctctgctgacagatacttaccgtctaaaggaggtaatccagaattaaagtcaaattgacaagccattcctgtaattgaggctaaaagcaagataagcgagaagctgtagatatagttagtggcatgaaggacaggcatgtcacctctggaaaaagtacgagttaagccggcacaccacctcctagtgccagtgactcagaggtttcagtgaaacatgcttgggattagtctgcaccgaaggccggcctcacccagctcctgacaaggggtcatttttagcttaaagaggtgccatcagctttaataggcttcaaatcttaccttaaagtcactgactcttcacagggcccagttttccagtatagttcccacctgctggcccatttcacctcattcaggaataagcttgaaaagcaaaagaatccaaagactgtgcttcaagatcaaaagaatcacattagcccaggaatcacagattgaaatgtctacagtcacctggccaggacctgctaagtccaaatgaataactgctcttcagttacaaggcagaagttcagatccagtgtggccagactttttcatgagaagctatatatccgggtttatgagtaaaaattcttctgttcttcaatattaacaagtaattactattttaaaagtaataaaaccaaataataataataaaattactatttaggcaaaattggtagtcagttggtactcaccagctcagctgtcaggattgttaaatattaaaatcattccacttaaattggtaaacaggccaggtgcagtggctcatgcctgtaatttcagcactttgggaggccaaggcaggaggatcacttgagcctgtaagtttgagaccagactgtgcaacataacaaggtcccgtctttacaaaaatataaataaaaaattagccaggcatggtgatgcatgcctgtagtcccagctagtcaggaggctgaggtgggaggattgcaggagcccaggagttcaagtctgcagtgagccgtgacggtgccaccccattctagtccgggcaacagagtgagatcccccctcatgataaataaataggtaaatagtcattatcctaaaccccctaaataacctccccaccatcctggctcctgtggtctgcccaagaacctgtcagactgctccatcattcagcaactaaagggcaaacaactaaccaaaggatcccctcaagaatcctgtttcataaatcaacaagcaagaggaaaatccattaaaaagtgggaaaagaacatgaacagacacttctcaagagaagacatacaagcagccaacaagcatattttaagaaagcacatcattactaatcatcacagaaatgcaaatcagaaccataattagataccatttcacaccagttaaaatggctattaaaagtcaaaaaataaatattgatgagattgtggagaaaagaaaattcttatacattattgatggcaatgtaaattagtacagtctctatggaaaagagtatggagatttttcaaagagttaaaatagaactaccataaatcattctaccaaaaagacacctgtactattatgtgtattgcaacaccattaacaatagcaaagacacggaatcaacccaggtgcccatcaatggtagactgactaaagaaaatgtgatatatatatgtatattatatatatattatatatattttatatatatatatcccagctatatatatatatatttatatatatatatatatatcccagctatatatatcccatatgtatatatgcatgctatggaatactacacagccataaaaaagaataaaatcatgtcctctgcagcaacatggatggagctgaaggccattatcctcagtaaattaatgcaggaacaaaaaccaaataccacatactctcccttatatgtggacactaaacattaggtgcacatagacataaagatgaaaacaatagacactgggggctacttcaggggggacaggagtgatacatgctttgaaaaactttttattgagtactatgcttactatctgggtgatgagatcagtcataccccaaacctcagcatcacacagtataaccatgtaacacacctgcacatgtaccccaccacatttaaaataaaagttgaaatttaaaaagaaagaaaaaagaaaaattaataaatataaaaatctctccacgttaatttaaaaaaaaaaaggaatcctgtttcagcaccatggccagcgtcgcttagtcagtgcctgcactactcttttttgttttttgttttttgtttttgacagtctcgctctgtcacccgggctggagtgcagtgacgagatctcggctcaccgcaacctccacctcagcctcctcagtagctgggactacaggcactcaccaccacacccagctaatttctgtatttttagtacacagggtttcaccatattggtcaggctggttttcaactcctgaccttgtgttccgcctgcctcggcctctcaaagttctgggattacaggcgtgaggcactgctcccagcctcttttttcttttcttttctttcttttcttttcccttttttttttttttttttttaagatggagtcttgctctgttgcccaggctgtagtgcagtggtgtgatctcggctcactgcaacctctgcatcctagattcaagcgattctcctgcctcagcctcccaagtagctgggattacaggtacccaccaccacgccagctaatttttgtatttttagtagagacagggtttcaccatgttggccaggctggtctcgaaatcctgacctgacctgatctgcctgccttggcctcccaaagtgctgggactacaggtgtgagcaaccgcacccagccttctttttctctttaaaaaaaactttatggagatgtggttgacatgtaaaaagctgtgcatatttaatgtatacatctcaataagttggttggatatgtatacacctgtgaaaccatcaccaccatcaaggccacaaacacatccatcacctcccaaagattcctcccaccccctttattattattagtgttaattgttgggggggaggtggtaagaacatttaacataacatacaccctcttagcaaattataaacataaaacacagtattgttagatacaggcattgtgctcttaggtaaatccccagaacttactcatcttgcatacctgaaactttgttccttttacccatcaccttctccttttcccctcctttagccctgcctgcactattctttggaattatctttaatatcatctctgggcacaagtcatgaattgaaacacatatgatcctacaggaatccagtttgagattcctaatttattccaattcccttcattttatagtcggagaaacaaagtccagcacagaggagggtacttaccaaagtcatgaagcaagtcactgacagagccctgacaggagcccaagaccctgagctcccaggccagggcgctgtcttttaaatcaatggctaccaaacctgtggagggatatggtttgttaaaaacagattccttctctaccccactgctgccaaaactatggggtgggacccagcccacgctgtttttaagagctccctagataattctgatgatcagaagatttgcagaacattgttgcaaactgtgccattgtcacgccagcgacacgttagccaccctcatccctatgcgggagaaattttgaaataagaggagaatctctgaacatattattcatataatttttaacagatttttacacagaagacatgcgtgtgtatatgtatgtgtgtggatgtgtgtatgtgtgtgtgttaggatggtaaaacggtttctcccaagcccctgaaatgtgtcttattgctatactaaataaataaaattaaaaaggaaagtttcaaagactgatagtgatggatctgcagagaaatggagatgtcatgttatcagaatgggacaggtcctggtttaaaccctagcgccactgcttagacgatgttgtccttcctcaggcatctcacttaaggttctgcactttacatctccatctataaactatggcaccaactcctaccaggcgaagtaattgtaggttttggaaataaagttgtcagttctggattacgctagcagtggattcatcaggaacaacaggagcctcatcacagagccgggtgaacatgtggcatctgctctgctcacagcgatggcagaagagccttagcagcctgtgtccaagcccagctacaaaagtgagggcatcccaggcccctgtgatccctttgccacctctgacgctcacactgatgaggcccaactcacccgccaacaactgattctgggtttcctttttctttctttttccttttagcagtgatttggagttacctatatatttctactgtcacaccctccatgtaactttagaaccaaccttagtcataaagcattttgcacagtactggcatataggggcagccacaatgaacatgactatggctggaaggtgtggtatgttgattgagaatcccactgtagaccagacagaccaaggtgcagctacacaactgtggatgttatttttaaacaatgtctttgagtcttaaattcactatcagtgaaatgaagacaataatggtagctcctacatcacattattgcaaaagctaaatgagcaaatctaggaaagggcttagcatagtgcctggcatgtaatacatattcaataaatgttgctattggtgatattaccattaatgtcatcattaatttcatcattcaacctcaaatttgagggaggcttgacaatagcttgtaagatttggtgataggactagcagcctaacgatggctaccaaacctaagatagaccccctcaagtctctgagtccaggagaagggtgtttgcactatggcttcaggccacagccagctgaggaaaatagttccagaagaaggcatctctaagtctgaaggcttgctccagaaggactgctggaaagccatcaaccactgtgagccttgttcctggggctcagctgagggatgccaaggaggagttctgggagatcttgagcttctggtggcccacgggtgtctgggaaatctcagatctcccagatctcagatctccaccagtttttatgtacaacgtgtaagttagacaggcaggccatcaacccaggattcgaagacaggcttcatgtttcttgatctaaatgttgactcttccctgaacactccaggatgcagcacagagcccagcaacaaagagacaaacttccagacataacagctgtattcggagtccagctctccagcagcctcagggtgtcattgtaaggatcagacaccattatgtaaagttactatagagtgtaaatcaggataattattattaacatcatcactacatgggctaaagttttcatcacaatactcagtgtgcaaaaatgtaactttctgtaactgaactcaattttttacagttcacatttttgtccgacgcaaaagtgtcatatagttacctccagataaactcattttcttctgggtaaatgcagaagtttcaggattaaaagtgtttcctcctcccccaccttcttcttctggatgggggatctcagatagcccaggtggcggtgggggacagggcaactcctcatctgagtcttggtatcagggaggcgtcaggtccacagtcattctgacatccgtgtctccttcagatccaggagccttctcctggccacttccaaactggcctcaggtgcagaaaacttttgcctgcttcctcctgtctctactttgggggactgtctcaggccctttggtacctagacacacagagcaccgtttgtttgccttgactagggtagaggtgctttggggctccctttaaaggcactataaaggcactcgtttatagccggtcccctgaaatacatgcgggtctctaagcgttcagccaccagctgtcttcaggtctcagcaaggcacagacccatgagcagaacagatgctgtatctgcccttatggggccagcaacagaagacaaataataaaccagtgtgcaaatcaatatacctgggattgcaaatcaagaaagctcaatcgaggtaaagtgggaggaagtggtaaaataaaccagggtggggggcctcttctatagttatcgggaccagggagggctgcagagaaggtgttcgccgcgctggggcctgcagagaggagaagcctctgcgtggagaggagggtgcaggaggaggcagggtggacactcaggtgggaaaacagcctgtgggggaaaggccttaggaggcctgggcctgagctgggcttggaagcaaggtcagcatggctggaacacagtcagtggaaaggcagagccaggcctgaggggcacggccacaagtggagtttatcctgagaaaaatgcaaagtcacagaaacttccattttagggattatttttaattattgaaggattttaaccaaggatgacatatatatttttgccggtaaaaatattctgttagcaacagatctcaacagaggcagtccggccactcccagaagacatgacaaaactgtagggacatttgtggctgtcacaatgctttgagcacactatcagcattggggatgtccagcgatgctaaacatccttcaatggatagtaaagtcctgcacagtgaagactgttcccccccagatgccacaaatgtgtttgtgatgagattcactggggatctagtagctgcttggaaacaaagagtagagggaggctgggcacagtgacatgagcctgtggtctcagccactcaagagcctgaggctggaggatcacttgagcccaggaggtcaaggctgcagtgagctctgatctcccttctgcactctagcttgggggacagagatcctatttaaaaaaaaaaaagagtagtaccacacaagtggtagcagggacagaattaggacagtactggagttttccaggtgggaaaagatgatgctgagatggggctggagcctcagagacagagaacagtgggaaagtaggcagacactgtgagctgagcacacggtgttttgtgttagtgagatgtggtcccagagtcagcagtgctcctggtggccaggagcaattgtctagaggtggcagctaaagagaacctatgtgaaaagcacgtggctcaggcagtcactcagaggtggcataaagagggtttagaaggaagcaatgggaagttcatctggaaaaggaccctgtgggcaagtttttgctgaagggcatggtatctattcaggaatgctccagtgagcttcctgaatataaagacactagctccttcctctatgaggggattccccctagaagcccaccagacttgccacctcccttccttccccacaccccaaactaagcctcacaactgtaatttgagtgttctccacaatgttttaaagcctctgaatacttgcctattactccgaaaattagctgccatacataattaggctaatttggtataatattcatccgaaatgtgaacatgttattaataatgaaagcaaacatatggagcaggtgtccttgctctgtcgagagatggtggctaagtcatgagctctgcccacgaatccttgctgtgcctcccccagtcaagaaggcagcatgactaggaaagaccttgcagagccccaggaccttgtgggagtcctcactggtggttatttactggggccccatactctgaatgtagcgttagcatttattccagtagattctcctcgcttcgggcaaattcaaaaaacaatcccattcagaaaacacttattgtgtctcctctctgcctctcaatcagccttagtctgtatcctcttgtggattgacaaagattgcagaagagaccctagaatgaggacaacccaaggttcatggggtggactgaaatatactaggtgagaaataggaggtgcaaatgattgggaataattagggtctctgcccagctgccctgtcatgttacaaatgtgcccacacctcatgacgcttcctgtgggcctgctgcccttttccacaggtggcatggcactgagctggacacccacatgtacaagtgtccatgtgagcttccagacatcaaggacagtgtttaaaacaagcatacctaaagccacggtattgaaactaggctacggtggggaaacaaaccatgctctctctctctctccctctctctctctctctactccctgattaactcactatagccaatttgaatttggaaattagaatttttttaaaagttttctaagtttttaggtcagtttattctgtctgtcacattaaatcaccagagagaatgtatttgccatagatcagactttcttttcatttaagagcattctcatcaagaaggcttccctaattatgttcaatcataacaacatggaatggggaatccgtgcattaaaaggcagtctcacaatgacacgtggctagtaggaactagagatgtgctgtcagacgtttctgaaccatgctgaaacattagatctgaaattgacccttgccttatccatgccaccataccagactggcttggggaaaattaggtaaatcacttttccattccaaatacatttggagacctgtgactttttagaatcatttatatggttatagcagacactgttgatgggaccaatcccctcagttcgcctgaggtcatgtgaagatgtaatagctggttcccagcttggtgacagcctcctgcctcaagtatttgcacctgtctgcttctctgctgaactttctccagcaccacaagtatttgctccactaagtggggacatatgccagaatttcaggggcagggtaccagggaaaaccctcaaccaacagaggtgggagtcagtgaataaatgcctccacctccccaccttctggtgagacaattctaggtgtgttccatggagtttcttaaagggcctccagccaggtggattcccagtgaccactcatatgcacaaccctcatcagctttctccgtccctgtctcatttccccactccctcacttgtgcttcctgaatttgtctacaagaagatagaatcacatgtcctcgaatctgagtctgcttctgcaggaacccaaaataagatagagacagagatagtttcatagacaaaataatcccccctcaactgataggttttagaacatgatgttgcagtaaactcaggccaagctgctcaccacctgtcatgctgaatacaagaggtgaggtatggggagagggaagtaacttttattccaaatgccagcagctggggagatgtcagggctcaagtcatgaagaaaccatcttcaattgcaggctgggtgaagggtgtaagaagggaaacttagtatgagaaacatgtggggtcctgctgggtaagggcctgcatgtctcgttctgagggctgtcttgggcgtctggaggtctggtcgtcattatcttgactgcagccctagtggtggtgaacacattgttcatgactccccctaagtgggaggatttcataacaggggcccatgcctggtttaagatgagcctctgggagtgttaagtaaccatgcagttagataagcatgcatgggacaagggagtgtctggtgggaaagagagaggaacatgaatttcaaagcacacttcaaggctatatttctaagcttaggaaaaagagttctgaatgcattttgaagatatttggttatagtattttattgtaagcttttggaaatgtatgtgtacttatttttatatgcagatacatgcataaacattttaaataaatgagatcaaattatgcaataaacagaaagatacaccaccaagacccccttacttagcaggaagctttctgtcccagatgctgagagtgctgtggaggtctcctccgagactgcctaccccagagtgcatgcagcccctgagtcggtccccatattgggttcttggcatttggaggagaagctgtaatggggaagaccacgtggaagctgcatcactggccaaactaatgagtctgaaacaataccatattctaagggtaggtggggaggtgggattagtgccacccttaaaggtcttaggaatgcaagggtaatggtccctattatatattcatttaactcactcatatggcccctgaagaactaaatgaattctgaaaaatggctttagactactgaagacataaccaagtagtagcccatttataactgaaataaactcataaataagtatgtgggacatttgtaaaataagcaaaaaaaaagtactaaagagcagaaaagaagacttgaataaatggagagccatactaatgttcctgaaactgaatatttaatcaaaaccccagagactgtaattcttcccatatgaatccatccttttaagggtcttaatcaaatatcaaaagatttattttcagaatatgaaggcagtattccaaaattaactttgaaaaacaaatgaacaataatagtaaaaactacattcaaaaatatattattaataagaagataaatggcaggatgattctattattattatatataatacactgtaaactaaaataatttatacagagataacagaattttttaaatttaaaaatagaatacagagtgacacatccaaaatctcaaagacctctaaaactcaattccttcttaaaagcaatgagaacactgggaaaaaataccaaaataactcttccagaactctaaaaattaactgaagacctgcaaaaatgtgagccatgtttattcaagaacagcaggtgagtcttggtaggtcggtgagctttgtggttctgacttgtcccatatcacccctccctggcccgcagcagccttcaaaaccagaaaccccacaaccatgtttgttcccaaaaccagcagtcttgtagcaactggagagtcccagtttagggagctgcaaaaagccccaaccccagagaactgaccctatttcatctgttgggcagcaccttggaaaagccccatgcacaggtcttgttatcatctcacctgatccagaaactcctcagggaaagtcttcagccagggtgggtgtggaaaatggtaagtgacagttgtttaacctcacagctgcctgagaaagtgatagcagttgcagcatgtaaaagactgtgcagaaaacgtaacaggaagtcttgaaaaagagatgtttacaggggacttcaaacactctgagatattcctgtgaccccacaggtcgtgggcatgagcaaggctctggcccacccaggaaaagacctgagaagccccaatctctcacttctggcggacctcaagttcctgcaccaacaggcagcaaaggctgaagctgagctctaaactgccagagtgctggaggcatcaaaccctgacacagagagagccctcagaaaggtgtagaagattcactggagacatcacacccaacacagaggagagagaaccctcggcgaggtgtagaagactcactggagacatcatacccaacacagaggagagagagcccttggtgaggtgtagaaggctcactggaggcatcacaccccaacacagagacagagagctctcggtgaggtgtagaaggctcaccggaagcatcagaccccaacacagagagagagagagccctcagcaaggtgaagaaggctcactggagatatcacaccccaacacagagacagagagagccctcggtgaggtgtataaggctcattggaggcatcacaccccatcacagaggagagcgagcccttggcaaagtgtagaacactcactggagacatcacaccctgacacagaaagacagagagagagccctcggcaaggtgtagaaggctcactagaggcacgacaccccaacatagagggagagcacctttggcaaggtgcagaaggctcactggaggcatcccaccccaacacagagagtgagagccctcagcgaggtatacaaggcccactggagtcatcacatcccaaaacagacaaagctcttggcaaggtgtggaaggctcactggagtcatcacacccaaacacagagagaaagctctcagtgaggtgtagaaggctcactggacacagagagagagagagagagagccctcagcgaggtatacaaggcccactggagtcatcacatcccaaaacagacaaagctcttggcaaggtgtggaaggctcactggagtcatcacacccaaacacagagagaaagctctcagtgaggtgtagaaggctcactggacacagagagagagagagagagagccctcggcaaggtgtggaaggctcactggttcaagacatccaagggatttgttcaatcatttgctgaccactgagccaaccaagcatagatgtcaatggtttcactgtattttacaagaaacaaggacctcacaaagttagtccagaaaagtcactaaacagcaaatagcaacaacagatcctagggagagggagtgactcgtttccaaagctttcaagttatattattttaaatgtccaatttttaacaaaaacttctgaaagatgctaagaaacaagaaagtatgatacacacacacacacgcacacatgcatacacacatgcacacacacgtgcacacacatgcacacacatgcacacacacatacacacacatgcacacagtcatcagaaactgtttgagggaccccagatgttgtctttactagaaagactgtaatcggcttttacaagtatgtaaagtatgaaaacaatgaacaccaaatggagaatattaataaagagatatacaatacttaaaacactaatggaaactctgaaggtgaaagaaacaatattttttaaaaaaatcaatggagatcaaacagcagattttagtttaaaaaaaagaatcagaaaacttgaagatgcattaattgagattgttcagtcaagaaagagaaaaaagaactatgaaacatgaacagagcttcagagacctgtagggcaccatcgtgcaagccaaataaacatgagtcacaggaggagaggagacaagagaaagaagctaaaatagctttgcaaaaagaatggtcaaaaacctcccatatttggtggaaatcattaagcactgtgaaattcaaaaaactcctaatagaataaattcaaaatgggccaaacccagacacattatagtcaaactggcaaaatatggagtgcagaaataggcaatcagagctggtcatttagtatatagtataagcggcatttcaattcactgaggaaaactgcattgttgttaatacagttgggccatcaggttagtaatttagaaaacctaatatgtatctccctaggttcatctgcatcatcacaaatgacataatttccttctttttaaggctgtatagtattccattgtgtgtatatgccacattttgtttatacattcatccactgttggacacttaggttgattccatacattgactattttgaataacgttgaaatgaaaaaggcagtgcagatatctctcaggcatatccatttcaattcatttggatatgtactcaggagtgggagatacagtgtggatatttgtcttctccaaatctcatgttgaaatgtgatccccaatgttggaggtgggggctggtgggagatgtttggggcgaatccctcatgaacagcttggggccctccccacagtaatgcatgagttctggctctattagttcacatgacctggttgtgtaaaagagtgtggcgcctcccacgctgctccatctcccaccatgtgacacccagctcccctttccctctgccatgactgaaagcttcctgaggttctgagcagaagcagatgctggtgccctgcttgcacagcctgcctagccatgagcctcaggtatttctttataccaatgtgaaacagacgaacacagtatattgctggctcaattatattgttaattttttgaggaaacttcatactattgtccaaaatggccgtaataattgacattcccaccaatggtatgtcagtgtttctttatctccacttcctggccagcacttacctttcatcatctgaatcatagccattctaacaggtgttgaggttacagcacaagttgtaaatctctcactgaggttttcattttcattatgtgatggttagaggggttgagcattttttcatacatttgttggctatttgtgtgctttctcttgagaaatgcctgttcatttcattcgtccattctttcagcaacttatgtgttttcttgctattatttgaatttcttacatatttttgacaatagccccttatcagatgtataattgaaaaatattttcttccaactcatggattgtctctttactctgtagattgtttctttgttatacagaaggaggacataagtgaagtaagccaagcacagaaagacaaatactgtattactgcactcatatattgaatcaaagaaagtcaatctcatagaaacagcaggtagaaacgtggttaccaaggctgggagaagggagaaggaaggggaaaggggagatgtcgatcaaaggggaaaggggagatgtcgatcaaagggtacaaagtttcagttacactgcaggcataagtgtttgtcatctactgcactgcacaatgaccacagttaagactaatgtatatatacagatatatattttttgagacagggtctcactttgtcacccaggctggagtgcagtggcataaacatggctcactgtagcctcaacctcccaggctcaagtgatccttccacttgagccctcacaagtagctggggctacaggcacatgctctaccaacttaatttttttattttttgtacagagtgggtttcaccatgttgcccatgctggtcttgaactcctgagctcaaaggatctgcctgcctcgtcctcccaagttgctgggattacaagcgtgagccactgtgcctggccaatcatgtatattttaaaatcgcaaaaagaatagatttgtgacattctctctacaggaaatatgataagttgttgaggtgatggatatgttgattagcttgttttaatctttacacgatgtatccaaacatcacattgtaccacataaaaaatacaattattgtctgtcaatttaaaaataaataaataagccagttaaataaataaggatataaccaaataatggaattcataaaagttatatgattaatttacagccaccataaagatatgacacatatgtattaaatatattctctgtgccaggtcctattctaacatggcgctaaagatatagcagtaaaaaaaacaaaattcctgccttcttggagcctgtattttaacggagggtgacagacaataaacacataaataattggaatgcataaaatgtcagatggtggcagctgtgatggggaatgataccgcaggaaagaggactgaggagtctgaggagctgaaagaagggagggttgaaatttcatataaggtggttggagaaggctccaatgagaggatgatgtgtgagcaaagacccagtggaggtgatgagctaacaagttatgtcaataactgcagggaaagaatccaaggcagtgctaaggtcttaggtagggtggcagtatgcttggtgtgtttgaggaatgtcaaggaggccaggtggctagagggagtaaggggaacagaagagtgggggccagataggcaggagcttacaggccatgacagggatattggctttcactttattattactatttttttaagacagagtctcaccctgtatcccaagccaaagtgcagtggtgcaatctcagctcactgcaatctccacctcctggactccagcaattctcaggcctcagcctccccagtagctgggactacaggtgtgcgccaccacactcggctaatttttttgtattgtagtagagacagggtttcaccatgttgcccagggtggtctccaactcctgagctcaggcaatccgccccactcagcctcccaaggtgctggaattacaagcatgagccattgcgccaggtggctttcactttaattgagataaagccatgagagagttttgagccaagaagtggcatgatgtgataataaaatgtaaacttcaaaagttgatacatttcaaaaaaaaatctgctggaattatttattttttccaaaataaactttctaaatgatgaaagatttaaatacaaaaaagaaaccataaaagcactagaaaaaaacataagggagtgtatttattgtctgagaaaaaaagacattagttttcacatcaaaactaaaaatgaggaagaaaaatgctgacaaatttgattatgttataaattttaaatttctgaatagcaaaaatcaaaattaaaaaaagagagagctgtaaaatatttacagacgcatagaagccttactacacaaacgtgtttgcaaatcaaaaacaaaaggcattaacagaagagagaataaaatagccaaaaccaaaaattatggtgaatggcacgcacattggaagatataaaattaaaacacaatccaatgctatgtttcatatatcagattatgttttaccttctttaaatctgtcattgtaaacaaagatatggtaactaaagtcaacctgaaaggaagaagctggggtgcaaaataatatttatttatatgagatggaatttcactcttgtcgcctaggctggagtgcaatggcgtgatcttggttcactgcaacctccacctcctgggttcaagcgattctcctgcctcagcctcccgagtagctgggattacaggcacctgccaccacaccaggctgatttttgtatttttagtagagatggggtttcaccaggttggacaggctggtctcaagtcccttacctcaggtgattcacacaccttggcctcccaaaatgctgggattatgggcgtgggtcacagcaccccgccccaaaatagtatttaaagaatttactggagccaacgtgaggacacctgcccgggacacacttcccaggtgccttggggagtgtttggtctgcctctttcacaaggtttttgaagtcaaggggaacagggggtgggctggtacaaagttgtttgacaggagttctcactggtttagagagataacattaattagagattgactctacattgttgacctatagggtatgagttaaggtgtcctcctagggcattttatggctatggggtgtcagttagtttagagcccatagaggaagtggcttcaagagataattacttagctccaggggtgatggctgttgcattttaaattcctctctgggtctaaacatttaaaggggctcacatttctcacataaaatggttttttgttttgttttgtttttttgtttctttctcactaaaggcatccctgaacagcaatttggctggatctgttaatattttaaagtttatcctttggcctagcattcccatctatagctatttcaccccgtagaaacaccaagtgcaaaaatatgccaggctggccagccacagtggctcacgcctgtaatcccagcactttgggaggccgaggcaggcagatcacctggggtcaggagtttgagaccagcctggctaataaggtgaaacactatctctactaaaaatacaaaaattagctgggcttgatggtgggtgcctgtaatctcagcactttgggaagccgaggtgggcagatcacttgaggtcagtagttggagaccagcctggccaatatggtgaaacctcatctctacgaaaacgacaaaaattagcccggcctggtggcacccacttgtaatcccagctattcgggaggctgaggcaggagaatcacttgaacctggggggcggaggttgcagtgagccgagattgcgccactgcactccagcctgggctacagagtgagattatgtctcaaaaaaaaaaaaaaaaaaaaaaagaaaaaaaaaaagcccaggcatggtggtgagcacccatagccccagctcctcagaggaggctgaggttggaggattgcttgagcccaggagtgtgaatcaagctgggcaacatagcaagaccccatctctaaaataaacaaattaattacttaactaattaattaaatatatatccaattggatgtttattgcagtgaagtaatagtaaaacaattagaaaaatctaaatacccatcaacagattttgatcaacttatctgtgaatgatgataatatttaatattagggtacctatatttaaaatcatataaaccttaaatatgttacctcagtgactgtgtcatagaatacaaatataaaagctttttttactaccttttaaactttatgttgaggcctcatctctagaatccagaatatacaaaatgttgctaagagattaaaggcaactgccaaccttaaagaatgaagttcagaagatatgattaagggtggagtttatttgggcacacagcttgaggatgcccgtctgggagacgccgaccccaaatgaatagggagagctggtgtttgtttcacttctaaagccagagacagaaacatcggtgagatcaggacactttccacaggataacagggcagagctggagcaaactgatcagtcacatattgttccattccaaggaagatgactccactccaggaagagggttagtgacctaagggggtcttgacactgttgggttataattatttacgagcagaaaaaagcggaagccgcagctgcattccacgtgactctgctgcatagccatgttcctcacaaggctcagaataaggtaaaattccaataactttaagtttaaattattttaagtttgaattatgtgatatcacaaaaccaaaatacttcaccccaaaatatgtgtcttaggcatattctgagctggctgttcagagggcctgcaaacacaaggagccctgcaaagctgtcttttgtggggcagatttgcacctgcagaggaaataaagggaagtaaacaacagatgtgaaaggctttctccgaagtcctccttgtcaaggtccaggaaagattaactgagaggctgacacctttaaaggtcttgcagagaaacatttaccagaagctgccacccaccccctttgagggctgccacctgagaggctccagctgtgtaccaagactgcctctgctaaccaggcctcttctcctcttctctctctcccgtatcctttttgccatgatccaagcccctattttctgtatattcaagagggctaaaagcatcaaccatcttgacatttgtttgagtctttatattttgtatgactcccaagcccatatgaatgctaataaaatgtttacacctttttcccctggtaatctgtgcattacatttatcttacagactcaaattaccaaaacttcaggaacaaagttaaatgttccttcaaaatataagactaggaaatcagagttgggagagaaattagagttcatctatcctctcacctcctttttcatatggaaatttatgactcagagagggggagtaactttcttaaaatcatgcagcaaaagacaaggtacaagatctcaagttttctgacttccagttaagcattttgctcccagaattttctcagactccagaaaatgataagcccttgcagggctggtcctttgtctcatctcccttttctcctctatgatccacacagtgcaatgcacagagcagagcctcaacgagcaggtgacagaaggaaatttaatcagtggttaaagttaagcacttggctgagcctcaccagtgggtgtgcttggtctgtcagcacacaggacttccccttatggctcctctgccctgatgccatgaaaaacagatcaggtcccataaatcgtgaggagtacatcccctcagcaaggtgactggagtcacacggttcactccttcagagcaaagatcttcccgtctcataaagcaaattccataaggggccttaagaagactttgtatgtaatttgctgaaccttaagcccaacatttgaactattttccatggagacctgtctgttacgcgcctggtgcggagcactgcctggatttcagaaatccaccccggtcctgtgctttctcaccagagcaagacccagcctggaggctccatgactcctgatgccatttttctctctcattctctaagaaacagatcctgaaacaaaaattcatgaataaaaaatgtatctgggcccaggcgcaatggctcacacctgtaatcccagcacttcgggaggccaaggcaggtggattgcttgaggtcaggagttcaagacgagccttaccaaaatggtgaaatcctgcctctactaaaaatacaaaaattagctgggtgtggtggcaggcgcctgtaatctcagaacccaggaggcagaggttgcagtgagctgagatcgcaccactgtaccccagcctgagcaacagagcaagactctgtctcagaaaaaaaaaaaaaagtatctggaaggtgatcccaggaaacacaggtaagggaatagaagagtgagatggggccaggtgcagtggctcatgcctgtaatcccaaagctttgggaggctgaggtgggaggattgcttgagccaagaattcgagaccatcctggacaacatagaaagaccccatctctacaaaaaaaaaattctaaaaaaattagccaggtggtggtgcacacctgtagtcccagctacatgggagatcgaggtggaaggactgcttgagcacaagagtttgtgccaagagctatgattgtgccactgaactccagcctgggaaacagagtgagaccctgtctcttaaaaaaaaaaaaaaagtgaatagaaaggctgggtgtgatggctcacgcctgtactcccagcactttgagaggctgaagtggcagatcacttaagcccaggagttggagacaagcctgggcaacatagtgagattccatctggacagaaaattaaaaaaaaaatagccctgtgtggtggcatgcagctgtagtcccagctgcttgagaggctgaagtgggtggatcacttgagcctggaaaggtcaaggccacagtgagctacagtcatgccactgcactccagcctgggtgacagctagaccctctctcaaaaaatagtcatcataatgaataagaggattgcaggaggtaacagtaaaggatggattatcaagctaattaccaatgtgggcaactggaacttgatccttctgaggcaggaggtgcaacctgactccagaagcgggactaggacgccagaacaaactgaggactgtctgaaacaggaactgcgcagatgtagctttccataagacacgcccactagtgagccgcgtcagtttactgttgccatggcaacactgggacgttacagtccctttccatggcaatgatctgatgaccctgaagttaccaccctcatcctagagatgtctgcatagagatgtcctttaatttgcatataattacaggtgggataaacgtggctgcagaactgtcctgagctgctcctccaggcacacagcctgtggggtggctccgctctgcgaggagcagtccccctgctgctgcacacagccgcttcaagaaaagttgctgtccaacaccaccggctcgccctcaaattctttgctgggagaagccaagaattctcccaggataagctccaatttggggctcacctgccctgcatcacttctgggcatagaacacactctttggagttagctcccatgaggacagaggggctgggacatttgtactgactcaaggcagcctcccatcatgggctgtccatggaggcagggaagattatcttgtttatcagatcttccaacgtgcaacaaaaagatcccggggtagttggaagtctacactacactacactacagtgataagacccagggagggatgagtgaggcacagacattatcttttaaatatattttgtctgtaaagtgatacttaaattttagttaagaggagagactgaatgagaaactattgaaatcttaggacagggctttaaagacttagctcaagtccccacccaagattgtatttgttgcccaaaactgcccacctacccatccattgacttccttgcatctctcaatgcaaagagagacttaaaaactgtttcaggttaatcggaagtaaaatattttggcttagcaaaatcactgtggatggaaattggagcaaccccatgagagcgcgtgcctgagctcagagctgccatgtgcactttattggcgctgggaggaggtaactgaagcggagaggttcctcactgatggtggggaaatcggctttaacagctaaggcaggaattagtcacccggggactatctgggcatgctccgtgaaagaggccatctgtggctgtttatgaggatgtgtttgtgaaaagcgcctggcaggctctgcaagagggttctggcgccacttctgagtttccttttcctccctagcccaccatgccttgtgacaagagcgctctccctggccattgctcagccaaggggtgggcatgaactatcccatgtttcaaggtggcacctccacctctagggctctctcagtcttggcctggaagagctgtcaaaggaaaatggggccctgaaggaaaaggaggagaacctgacaattccgagttaagagcaaggagaaaacaataaatttacaaaccatattagtggttcgtaactcactttgtgacgcctgctttggtccacgtgaagatgagggagaggcatgctcatggggtggctcttagtgctctgaatgggtagaggaaaattgtggccacagggccgcagggcacaggccttggctgatctgattttccaccatcccccattacattgttctgcattgagacactcccttttggagagtggtcatacactcgatttgaaagaaaatcttgatggagaggaggcagtcatgtggttcatgaactgctcaggcagcagcaaatctgggcttccaattccagtacatatttgcctgatgtctgtgtctcagacacctcataaaacattatctgggggtcagggagcggacgaagccagggtgggcagactctggcatccagtgtgactgctggaccctcctatccccagccagacacattttcacagcagcagaaggtcatcaggagataatgaaggaaacaacagaacaaacaaggaaacgtgagaccttgctcctcagagacatggagaagccaccagtctcagagccagggcatgcataattcctacagttcataccagaacagagttagaggcttccgtccaagtcctttccaaaggcaaattaccatgcctctccttgaggcctgtgttcttgtcaagcccaggagccctgcaggatgtgatcccccaaagcaggccacctgccaccatgcacgcccacctccagagtccctgcttttcctagaaaggcatccaggacttctgtacatgaacctcagcctgcctggctcacagcatccctcctctcccctcctatcaacaaggctgttatcaaaataatttttttgtttttgaggctgagtctctctctgttgctcagactggagtacagtggagctatctcggctcactgcaacctccgcctcccgggttcaatctattctcctgcctcaacctcccgagtagctgggactacaggtgcccaccaccatgcctggctaatttttatatttttagtggagatggggttttgccatggtggccaggctggtctcgaatttctggcctcaagtgatctgcccacctcggcctcccaaaatgctgggattacaggcgtgagccaccgtgtctggcccaaaataaatttttaaaaaattttcatcaattatttatttatccttaatttttcaacctttaaaaaattttcaactattttagaatcagggggtacacgtgcaggttgttacatggggatattgtgtgatgccgaggtttgggcttctattgaacctaccacccaaacagtgagcatggtacccaacaggtggtttttcaacctttgccccttgtagtcttctccttcttgtagtccccagtttctatttttgttatctttgtgtccatgtgtagtcagtgtttagctcccacttttaagtgagagcatgtggtatttggttttcgttcctgtgttaatttgctgaggagaatggcttccagctgcatccatgttgctgcaaaagacacaattctattcttttttatggctgtgtagtattccatgttggatatgtaccacatgtaaaacaaattatttttggtctcttgaaatttccctgtattttcctgctctctcctctaattagggtggttgccttcccagatctccacttgtggaaggggagctactccagattcaactcaatggccttctccccagaaagccatgcatacttctcccatgctctcactctgcttggttcatccttgttgcagctttatcagcctttgcctgggctgcacctgctgatgcacatgcaggcctcttccattgggatccacacttccagatgcagggctcattccattcacccatgcctcctcctgaccaggatttggatgttctgtatatttgtatgcacacacacacacacacatacacatataaagtatgtgtaggcactcaataaattcttgttgaatgaacagataaatgaatagacattttcctgagttttctaagacataatattctttaccccccctgaaattggaaacatgacccttaaggctgatggtatttgttgagcaactgctatgtgccggatgctgcggtggtaacttgtacacttgctctctcatgcaaaagctacaactctctcattctaaggctgaatcacactgtggttggcgtgaggtacaatcccaatgccatctatctgctccaggctgtggataggaatagaggtccaattagacttcagttcaagccacctgctgagagaggagcataggcctcccaatatcccctcccattgtttctgagtcctgcaaagacagtctcgtgagccacagacctggtccagctccatcaccaagcagtgtgggcctgattctgcctgccatggccagtcacccccatcaatgcctgtgcaaggtgcaccgcctccgaacatcccaaagctcccagatgtgctggaggtggcacaggatggaagaatcctgtccccggcccatgccactctctcatggcctgcaaataccagcagagtggctttggggcccaactcataaaagctttggctggcttctggtccccacccctataccatgggattcacaccagggccaagggctgggcagggcatgtgagatgctgctccttgtttatccttgtcagcctgttccaaagcaccaacatctcctcccagcctcccagttatgaaacaaaatcccccctgcattcaatgcgtgcagcagatgccataggtgggaggaggggcagcaagggcaaccttggcagcctgagccccagcccacccaccaacatgctctgccaagattcatttacacttgccaagctctgggctatgtactctgccttcattatttcatattaactcttagttaatacagtttaaatatctgtgaagatacctattattgccttcaatttctagattaggaaacccactgcaaggggttaaaaaagttgcctaagtcctcaaaaatagcgtcaggattagagtctgagttcaggcccatctctatccaaagcagtgcttttaataaggtagatttctcatgttagtctttttcttctaattaatctgtaagtttctccccctgctgtttggatatttacacctctcttgttcatggggcttatccctgggctgagtagaaacttgttgaattaggttaaaatcctgaagtcatcctaagctgctaaggaaagttacttttcccagaaacctataacctctcttgggagctccttatctctttcctcaaagcagggaatatgcatgaacaagacatttaattactcctcgtgatcagctcctacattctgtaataattatctttggcgatgttatcttgagtcccctgggtggtatggacattatgaaccattagaggctgttctgaaagctggccatcagtctgattcatattaggccaattacttttactaaaattaaaatttgtcaaggatagcttgatcatgagtcctggcagctaaaaggagccctttaaccagccatgaagcactctttggcagaagcacagtgatttcatctcaagctgaaggtctggttcttagtgaaactaccagagatcaaagggaccaacttccctggatttgtcaccttggacaaaagccctggctcccggtaaccactcccgctggaatcacgcagtcagtcattgcttagttctcttctatggcactcagaggtcctcaatagagacaaagaccagctcatggactcagcaatcatgggttttatggtgtagttggtataacaaatctatgtgttacccacacaacacacattcccatgtttcacttgccaatagaatcccagttttgctaggagcagcaacaggacgtgctaaaaaataattattttcccagccaccttttcaagaaagctggtcatatgacctagacattaaagagacctaaaaggaagtctgcttctagctttctgggaaatttttcttttctgacaacaacaacaacaacaacgacaaaatgcatgtgcttcccgttttcttttgtcttctcccttctgctgcatggagtaagcatgcacttgctgaaagtgcagctgagacaggccggctggctgatttcctattttgacatgggctaatgttaaaggataaaagcccttcactcaaactctggctcatctaaccctcaggcaatcagtacaaaagacctgggaacctattgacagcaaatttctatcagggggctaagggctttcctcaagtactgcgtgtgcagtcagacttaagctccagcctaaagttactctttcctcatcatgatgctaaaattcatgcccagagtggagatttagaatgctaatactacatgcaatgcataaagaaacgtgctgagccactgtgcaagcactggacaaactcctagacacaccctgacataacccttccctataaaagaccctataaggctgaactacacagtctccttgggggccaccgctcttttttcctgtctcacgctggctccccattgcacaaggtaataaactctcctttattgccacgtctttcttgacttctatcctgggaaatggaaaaaacccagggcaccagtctcatctgccaccctgcaaacatgagatgatcaacttaaaaatgaaatctgacctggttaagaatggaagaacggaactgtaaaaagacgctgggtccttggagacacgggagctgttgcacagcgttgtgtggccctcctttgagctaggttgaggaagttaggtttcatgtcacttactgctgaaagtaacaggtacagttgcaaagacaaccaaagaaagatacataatgaccccagctgagcaggagcatgaaacagtgtgatgggtggttctatctaaagaccactcaggtctggtgtggtgggtggttctatctaaagaccactcagggctgtggccgaggatggaaggcaaatgagatcagcatgggctgagaattctctctgcccgcacccttcacagcatgtcttcattctcacgtgtggagcacctgctgtgcttatgtgtcaggcactggctgtgtgatgctataaatataatacgactattacatggttgcttgaaaacatgaatatttgtaggttcggtatttcctaagtacccatgtcccactgccggccatccaggccatgtgagcctccccccaccgagcccctgaagagggctccttgctgcactggccggcacacatcaccacgctgagcatggggcagaaaggtcccgaggagaagggctcacgagatgccacccaagggcattgtatgctgttgctgtaaaggcccagttctcaccttgtgtcacttggcctcatcgtcacattctctggctgacctttctgtaataaatatgtttccgaaattttatgttaagctgatttacattttacatatgctatgatggtttccaattttactattataatcaatcctgagtctaaacttttctgtaaagtgattactttctccatttatctgattgttggaactagataatcgattatcaaatttttatgcaaaatgaaaaaatcagagataatgtcaataaaatatcacggaaaatgcacctgtgatgaagttaccagcatgtccctaaaacctgctctacccacagctgttacttcctagctgatgggaagtcctccttccaggtatgtaggccaaaaggaaaaaagtgctgttctaaacacgcatctttcccttacagccacattcaatcctttaacaaacactgttgctcctgcttccagaatgcacacagaatctgagctcctctcgccacttccctgccacgaccctgctccaagccaccatcatctcttaactgaattattgcatcagcttcctcacggatatcctgttcccacatttacctccccgcagtctatcatccaccacaaggatcccccaggtcactgttgtgctcacaacctccaaaggcccctgcctctctggagcaaaagccaaaaccccacccaaccagtggccaacatgacccacgtgtctctctgcgggctctcccggggctctccctgggctgcctcctgcctggctggctccaccacactggcctccagctgctccttggggcctgtgctctggccactgcctcttcctggaatgctctcccctccggatgtcttcatggttcactgcctctcttcctcacctctgtgttcatgtgtcatattccgggctatgggttggacaggaccagggtgtacatggggaggctggatgggagggccctagtcgcctctgctccccattttcttaaaccagagcagcttcacttttgtgggcctcatatactggagtttcacatacgattttatttgagcaaaggatactaactactgtctcaacagaaagcttgaaaaaccaccagatcgaaaggggcatggcaggtggttgggagtcttgttagatattgttgatgtatttgtgggaaatgataatgtgtggcccaggatagtgggggaaatgaaacagatggccttgggaaacactgttgagggtgaatttaccaagcatgtttattgattggctgtggaaaccaacaagtatctgaggcgggtctcaatcaaatcaaaagttttttttgtcaaggttaagaacatgcctggaagaaaggactacgggatcccagaaacagcctgtagtctgtgcccttctccagagttgactttgagggcttcaatattttaaaagggaaagtgggttggagggaaaagagggagggcatggtcacattactgaatccacatgttgcaagggaaaaggaacaggtggggaaatagtcaatcatgcatccttcctgcactcagtaaatcggcactttacacagacaaggtgaacgcagagtagagatattaatagttagccttttatctgtagctctctgcttaggaagaaaagaaaaggcagcttcttgcatgactcagctttcagctaatttttccttttggcagggtgcattggggtcccgagattttattttcttttcatggttgtgggacaggagaaagaattagggatgctctttgcctctgacatgaatactggatatgtggtgattgttcatgccagatacgcaggtatcttagatgagaaattcatttttattgagtttcgggtgtttgagacagtcccaagaaaactattttcatttcctggctgtcaggaaataaaaatgtttttatttccagtcagtttcagggataaggtgagagacaaggtcagataggaccagggattaagtagtcatcataaataatagtggctgccatttgtcgagggccgggtgtatgataggcgtcgtattaaacacttcctctcataaggaattaaaatgacattataaacataaagagtgtttgttcatgtcgtatttctgttcttctcattcacttaagttagtgaaaagtgggatatgcatgatgaaagagatgcttcatagaaatggtgggcaaaggagctgcggggcctctgggaggaactagaagcagcccccgcacacccttagccccgctttgccatctcttgcccgtcctcctcttgaaagatcctcttcgccctgctctccagctgcaccgcagcctgccctgggcctcacctccttcagtggaatcagcgcgcccaggaagaccgagcccctgttgcccagcagcggtcacctggtgacgaacacacccttttttgtctttctttcctccatgtctcactgtcccactgcctcatcgtacttctctggaggctacctccacccaaattattgtttcagggtctgctttgcgagagaacttaaaataaggcagagaatgtgagggaagtttcttggactgtgcagacagaccagagaaaaacaaagaggccagaaaacagagagcggaggccaagaccttctgcttcccgagggacgcggcgccctccggcgtagcctgaggggcattagcatcttcgcagtcactaaccacggtcatccatctcctgcctccgcgcagctcccacagacagcctgaacggaacctgttaattacgctcccaatcagtccatagatcaaacgtacaaacgagcagcccgttccttccttattattattgccactgccacactcctgcccataatccctggcccacagccaggtctttgtgttgttttgaaaccagcaaaagcaacagcatgaatcttctgttaaaacacacacacacacacacacacacacacacacacacacacacacacacacacaggcactccactaggctatttttatttcctggctgacagtccttttatcatctccagtgggtaagaaattaattgggggcttgaaaatacaatttttctataggtgattactgtaaaccactgggctgccttgcagagaggggactgtttccatctcaggctaggaaaacttggtgcattttttgcattatttctaagacatcatttcccaattacctttgaaatgcttcactggcaaccctccaaaacaagccctctccttgctaacagggtacatgggggagttctccacatcatttagagagccttatatgcacaatctcccctgacacaagcactccctgaaggattagcgagcagccacttggactaataacaattccccaatatcacaggtgaataattaccagctcttcttctctaaaaatggggaaataaaagaagatgggtaggacagaggtacccagaagaagaaagagaggaaacaggactagtttcatttttttaaaagagcattaggttagaatttcaccttcagtttaacctaaaactatctgtatctgtatctctatctctatctctgttctctctatctctctctctgtctctctcaatagatgatagatacagctatattttaatatctccctatttctctcttttttcctatctctctatctttctcagataatgtttccagtttatcttcaatgtgacatttccataaattgacggggctcacagggtttacaacaaaggcatgtaataagccctgcaaatactggggagtcaagattcacacaccttgagtaattggggcaccacagagcagaatatgtaatcaagtacaaaatgttgtgagcacaacaacaattacacaacaagtacaatcaagttgtgagcaggaagtatttctggaaagggagagataaaggagggagaggggataacaatctctggacactagtcttggaagctcccaccctacgcaggctgtgacaggctcctcatgaccccaccagttaaggccttgttgggtaacactcattcctaaaaagctccaccttatcttgaactgaaaactggctcctaaaagccttgtttcttcttccctctgaagcctcggaacactgagtttctttcttattcctcaagatatatgaaggtagttcttccaaactctcaagtctttaatgacctctaattttctgactctaaaaaatcttttttaaagaaaaggatcagattaatgtcactctacatttaattttttaaaaggcattttcaaatgaaagaagccagacatagtttaggatttacgcttgacaaaaccaagcccaactcaagagaactgaaagcagagactcaaacctgtgtttgcacaccggcatttacagcagcattattcattgcaggcaaaaggtggaaacagcccaaattgatggaagaatggataatcagaatgtggtacacgaatacgacagaatattattcacctaaaacaggaatgaaattttgacacatgctacaaaatggatgagcctggaaaacattatactaagtgaaatgtcagacacggaaaaatactgtatcattgcattcacatgacctacctaaatagtctaataaaaaacacagaaaggagtggggtggttgccaggggctggggcaaaggaaataaggagctattgtttaatggcatggacttccagttgggatgatgaaaaggttctatagatgggtaatactggtggttgtacgacaatgtgagtatacttaatgccatagaagtgtacacttaaacaggaaaaatggttcaaatgatacatttctgttgcaaatatttcaccaccaccacagaaaacaagtccaatgtctactcactgacttccccagcccctcccagtaaagttttctgaattacttgcagtcaattcagactataccagatgaagtgtttctgatcatccccttggctctttgtagaagcaaatacccagaatggccatgtcacagctcccatatgttctcccacgtcccctgccacatatggtgacacatggccacggactgcaggcccgaaggttattttcatcatggcagtgttcctctttggcccacatccctaacctgggatcaagttactgtggtctgggtcaaagctggcagcccacaaggttttatagagagatgctggagtattgagatgccagagcaggactgaagttaaaacattacacaggaggccagaggaaaaaaaagggatttgtccaaaatcacagaagagaaatgagattattttcagtcacactcaggagcttgctgatcctgacaataaccctgacgctgtgcttggcaatgccctctcatcgggggcatcgggggctaagcacagaaggcacatgttcctgagtgttgtctgcatcgatgtggttacatgattccagatggaaacaaataatctattctttaataatctgccctcttttaagactggccctacttgatctcctgtccccacttagaagctcacaccccagctgctcaggagaatggcgtgaacccggaaggcggagcttgcagtgaacagagatcgcgccactgcacgccagcctgggtgacagagcaagactccgtctcaaaaaaaaaaaaaaaaaaaagaagctcacaccccaccccagagcagctccatcaggaagaagttatacacttcttgtataacttcctggattataaaatgtggcagctgcctgccgatacagtgcaaatgaatgcaaatcagttgccaaatgaaattggaaaaatcttgcaccttctataagatttgcaaagtcagtgaaagtgacaagggaaatgccttgaatcccacgcaaatcactgacaaatgaggataacgcagagttacggtagttagtgcagaagaaaaaaccacaaagcgatgatttgaccacaggcaagcttcagaagcaaaagaggcctgcaggagctcttggaaaaaatggaaaagtcttcaaacatttggctgaggagatcctcctaggactgtagttacgagttaggcagttgttaataagactttcagaaaaattgatttgttctgtagtacatgattgcaactaaaacaaagattgttttaaacataagataaaataaacaagtgttttttttcaacttatatttgaagttcagggacacatgtgcaggacgtgcaggtttgttacataggcaaatgtgtgccatggtggtttgctacacagatcaccccatccctaggtattaagcccagcatctattagctattcttcctgaggccctccctcccacaagtgtttaatcaaatcttttttattaaacttattatgaaatattgttccattttaaatggattcccttttaaaagaccttttctagtgctgctagcctgacaagtgagcccactgtgtgtgttgtgtacgtgtgtgtgtgcgtgtgtgtttgcacgcttacacatcttcctgtgtgcagcctgcatgcagcagtccccttgccttccagccacataccgtcaagacatgggctgaggttaccggctgcatgttatattgaacaaattagcaaatgaagctggtatccacacagtgccatttctcagtcaccatccccagaagagtattttgtattttatttccaggaatggggcataagttcacaggaatactttcccctcctcccccagtgttccttaaaaaaatcatgctttgtgtttgtaccttgcactttcagctttgctgaagggcttacctggcattatccatttttaccccacaacaaccttgtgagagtttccagcaggaggtatcagccccatcagacaggccgaggtaaagaaaggctctgtccagcagacccagttcctctccaccctcaaggcttctgcctcccagaccaagcacctgtgatcctgccctgtcagtcctgcacttaaactgacagctctgacgctctggggtcagcttgcattacgcctatcacctccatagctcagctccatagtgtgatgctactcagcaacccaacacgttaagatgggggcgcagaaaacctgaacacacagagagaatctaccgtaatgaagagcaggacattatagtggacaacaacaggattaagcaccaaattagaagccagaagtgggaagttcccattccagcctcactcctcactagttgtgtgactgacttcagagagcaggtcattcggccatcctcagcctcagtttccttgcatttgaattgaaaatcatttttaaaaatgtgtatcttatttagttctagaaagggccttagtattaaaatctcagccctgtattgaattatacaagagtatttgaggagcaaatgagctcatggaaatcttttaaattatgaccctaaaaaatgagatgaagggtcattgttatctacaaaagacactaaaaatctcatttatgcccaaataaccaactcttctttaagcaaaagcatatttgagacccaatcattttattagcaatagtaaaaatcaaatgaaaagaaaacctccactgtcatacaaacccagtcaatgcatccttttctttttgtacgtcttctatctcattccctgttcacagttaatctgacttaatttaattataatcgcagcatatattatattgtgatttctgcatttacccatgttgtcatatcacccaccaacaaaaacagaaaaaggcaaaatatgtaaatataatttctcatttccacatctgatgcccaatctctttccatagacaaacatagggtaaaacgtccttggaattgatgtcctataagacggagataaggagaaaggcctggttggctattgaacctctacagctatctcataaaacactttaaaatggcagaaatatttttatccatatcagcccatgtggcagccactagccatgtaagacccgtgagcacttgaatgtggcaggtgcaactgaggaactggacatttaattctatacacttttaatttatttacatttaaatcagcacatgtgggtagcggccactctattggacagcacaggagtgcctggctgagcagagagctggctgagtttcagcaggagatccgagcacagaccaggttcccactcagtgccagggtccctgaggcccaagactctgcacccacccaggcatacttgtcctttgtcactttctggctgcctagtgttcatttccccttctaaaagcagctggatttcatttggtgacctactcttttcatgtcatgtccttgaggcaaacctccccagcatcttgtctctcactgaagagagtaaaaggggactccttactctttgggaatgggtctgtggcccaagccccctacccagatggttcctccaggactttgagtacttagaatccagaatcactcgagttgtcctctgcagtggcagcagtggccacatgttgccagccacatggaggggacgaagatttcccatccttgggcatcttgagcttcccaaacccgtttcttcagcccacattatatgtcccataaatcccttttaacatagattattcagacactgttgtttgcagggtaggaaccctaacaggccccaaagatgagccagggatggttctgatcattctccctgtgtgtcctcaacccagatgtgctccaggaacttcctcactctcatttccattcttcccctggtatagtctgctcacccagaactgatagcatggctgtttaggttttcagcctgaagcacactgaaggcaaatggtgcgacaggtttttctttttgggaaaagtgcgtctccccactttgaatctcagcatgaccaatatctgtctaggggcctgctgttcatggatggatgtgctaattcagagtcagctgagaagcccacctcaacctccaaaagcttttcacctggactccccaccaccccctagcaccagcccataaacatcttatttaagccaaggaaactctatactggaggctggagggatctcttgaagagcttgtacatctgcttgaatgctcaaaggatcagccaggaccaaagtatatacactaccagacgaaagtatcccttcaaaggactcgcactctgctagaggagcacattcccaagactccacttcactcatttcatctgcgcagcagaacccagcaaggcaagccactccgcttttcatatcctgacattctgaaggcaagtgctgattaccaacagcgcaaccgtgaaacagcaccacggggaacactttttaacatatctacctaattagccccttataaagtgtaatgtgatttcttgcctcatcttgtcattagtttcatgagagtctttaagaaatgacagagtcagaagggagaagaaagaggcatgtcacacccaactccatgtgcttcctgaatggcccaactgtccttgaatttagcaaggtgcacatgaagcgcccccgagcttggcacaagggcttgactgctttaacagagctgtgggaagagttcccccaagcaacttacatgctcatgaagataatgcatagaccccaataactgcatgctccattccaaaatagctttggagaaataagcaccgatgtagccataaggaaaattacgttcaagtctcagccaattcatttataaatctgtaccttgggaaagccatacccagtaagtctactcatgggcctacagcatgttgataaggccatgagaagatgaccgtaaaagtgtgtatcacagtcattgctaatatgtattgagcgttttactagatgcaaagcatctttgggatgatttctttataacacagtcaacatggtcaaaaccattcattcattctgattcaaatgtcagggacagtctccctaaaagcaacatattcggagaggtcttgcctcatcccctgatcaaaaattggcctcttctttcattctctcttcttagtccttgaaacagttagagtcatatctcatgttaaggatttggctttttaattcccatctcccccatcagattgtaaactctgcaaggcaaagaccacgtctgttttgttcacccgatttcttaacataaatcctgccatctaaatggtgatgaataaatattaaaatgatgactgcctgctttgtaggcgagagaacttccagaagacccccaccatggcagataaactgtctatatttaaagaagagagctgcagagtgagactccttaaactactgccttttatttcaagcattccatacagtagggacacagccataaagaggacgcactctattgattgaagagtatattagtgggagaattaaattcatgctcctggattatgttaataatattatttcctactaacacatctgattactgtagatttcaatatataatattagtcttcttagaatcaacattaggtatgatgatgttagctataatgactttagctagattcttttattcgcttaacacagattaatcaaatgcctcgtgtgtagcaggcaccatgttggtcccaagtagtatttgcaaaaaaaatgactgaactttattcttagggttttgcggggggggggggggggaggacgggttgggttttttatttttttgttttttttgccttttttttttgagacagagtctcgctctgttgcccaggctggagtgcagtggcatgatctcagctcactgcaacctctgcctcctgggttcaagcaattctctgcctcagcctcctaagtagctgggattacaggcgcccaccaccatgcctggctaatttttgtatttttactagagacagggttttaccatcttggccaggctggtcttgaactcctcaccacatgatctacccgcctcagcctcgcaaagtgctgggattacaggtgtgagccaccgcacctggcctattcttagggttttggataacagtctgaacaccaatatcatataccttataccacctgctcaccatcccattctcactctgttttctttaattttttaatttgttaatttttgtgagtacatagtaggtgtatatatctatagcgtacttgaaatgctttgatacaggcctgcaatgcataataacacatcatgctgaatagggtatccatctcctcaaacatttattctttgtgttacaaagaatccaattatactctttgagttattttaaaacatataattaagtgtaattgattacaagtaccattttatgctaacaaatagtaggtcttattcattcttcctattatttttgtacctattacctgtcctaacctgccccctgccccacctgtcccactactaatcccagcctatggtaaccattcttctactctctatgtccatggagttcaattattttgatcttcagatcccataagtacatgagaagatgtaatgtttgtctttctgtgtctggcttatatcacttaatataatgatcttcatttccacccatgttgttgtaaagaacaggatctcattcatttttatggctgaacagtactccattgtgtaaaagcaccacatttcgtttatctattcatctattgagggacacttgggttgtttcaaaatctttgctactgtgaacagtgctgaaacaaacacgggagtgcagacatctcttcaatatactgatttcctttcttttgggtctatacccagcagtgggatggctgaaccatatggtagctccatatttagctttttgaggaaccttcaaaccactattcatagtggttgggctaacttacattcccaccaacagtgtatgagggttcccttttctccacatttcaccagcatttgtttttgcctgtcttttggatacaatcgattttaacagggatgagatgacatttcattgtagtttttatttgcattgttctgatgatcaatgatgttgagcaccttttcatatgactgtttgccatttgtatgtcttttttgagaaatgtctattcaaatatcttgcctattttttgatcagattattagatttgtttttctctagagttgtttgagctccttatatattctggttattaatcccttgtcacatgggtagtttgcaaatattttttgcccactctgcggggttaccactttattgactgtttcctttgctgtgcagaagctttttaactttttaacttgatgtaatctttcattttattggtgttcttatttacaatcaatgttaatattgataagtaagaacttactcccgccattgtgttaacttgttttctagttgttctgtgatgttctctgccttctttctttccttcctttagtgaaagtgatttttctctagtaatatgatttagtttctagctttttactttttgtgtattcattgtatgtttttatggtttgaggtcactatgaggcttgcaaatactatcttatgacttttttttttccttctgaaacagagtcttgctctgtcatccaagctggagtacagtggtgtgatcttggcttacttcaacctccacattctgggttctcatgcctcagcctcctgagtagctgggattacaggcatgtgccaccatacctggctaatttttgtatttttagtagcgatggggtttcgccatattggccaggctggtctcaaacttctgacctcaagtgatccacccaccttggactctcaaagtgctggcattacaagtgtgagacaccatgactggcttctttatgacctgttactttaagctgataacaacttaacattgtttgcataaacaaagaaacaaagaagcaaaaaaaaaggaaactaataaaaactctacgtcttaactttgtcctgattttaaactttttgttgtttctatttatatcttatagtactgtctatggcttgaaaaattgttatagttattatttttgattggttcatcatttagtttttctacttagaataatagtagtttacacatcacagttacagggatataaaattctgtgtttttctgtgtgcttactattacccatgaattttgtactttcgcatgattacttactaacatccttttctttctgattgaagtactccctttggcatttctcataagacaggtctagtgctgataaaatccctcagcttttgtttgcctgggaaagtctttattttttcttcatgttagaagaatatttttgctggatatactattctagggtaaaagtttctttctttcagcactttaaatgtgttgtgccactctctcctggactttaaggtttccactgaaaagtccactgcaagacatactggagatccattgtatgttatctgtttcttctcccttgttacttttaggatcctttctttacccttgatctttagaatttgattattaaatgccttgaggcagtcttctttggatttaatctgcttggtgttctgttttcttgtacttggatattgatattattatccgggtttcgaaaagtctctgttattatccctttgaataaacattctacccttatctctttctttgtctcccctttaaggccaataactcttagatttgtccttttgaggctattttctagattctttgacatgcttcattattttttattctattttcttttgagtcctctaactgtgtattttgaaatagcctgtcttcaagctaattctttcttctacttgattaattctattattaagactctgatgcattctttagtatgccaattccattttttatctccacagtatctgtttgatcattttgaatgatttcaatctctttgttaaatttatctgatagaattctgaattccttctctgtgttatcttgaatttctttgagtttcctcagagtggctattttgtattctctgtctaaaaggtcacgtatctgtttcttcaggatgggtccctgatgctttatttagttcatttggtgaggtcatttttttcctggaatgtcttgatacttgtaggtgtccatttgtgtctggaattgaagagttaggtatttattgtagcctttgctatctgggcttgtttgtacccgtccttcttgggaaggcttttcacatatttaaaaggccatgggtgttgtgatctaagttgtatctgttttagggggcaccccaagcccagtaacactgcagtttttgcagactcagtggtattgccttgatgatcttggacaagatctgggagaactctctggattatcagagagactcttgttctctttcttactttctcccaaagaaatggagtgtgtctgttctgagccacctaaagctgggatagagtgacataagcacccctgtggccaccatcactgtgactgtgctgagtcagacctgaagccagtgcagctctgagtctcacccaaggccgactgtaaccgctccccgcctagggctcaacaatcagcagacggcaaagccagccaggcctttgtccttcccttcagggcgatgagttacccccagtttccaggctggtccagaggtgctggctgggagcctagctggtgttctattgtactgtggctgagctggcactcggacaacaggatgcagtctttctcactctctcctaccctttccagaggcagggcagccttgccccatggccaccaccccacaggcctatgcggagtactttcagattaccttctatgtcccttgaaggcccccagggctcttcagtcgactgtggcaaatgctgcctggcctgggactcaccctttaagacagtgggctccccctggcccagggcaagtccagaaatgccttccaagagccacatcccagaatcaaagattccaaaagcccccttggtgctctaccaccctgtggctgtgctggtgtctcagatgcaagacgaagtcccttctacattttcctctgcttttctcaggcaaaaggagtctcggccatggccaccacagctgataatgtgctgtctcccctgaagccagtaagtctcagaggctctcagtgtagcagctgggtattactgttaacatgggctacccaaaaggggcaagagaactcaaataatatatcactaaatagtaataatacttatcaatggaaagataaaagattatgtcaaatggaaaaatacacatggtattctgctaatgtgtagaacataaagttctatcaatcccaacactacaaaataatacttatatagctaggtttgtcatagttgaaagcaaccaggccaatttcaacagaaaaacaatttaattgagaatattcggaaattcacgtacatgttcggaggcttagggaaccaaaatgagggacagcataaacactgccccaaatgacacagagaatggtttgacctgccactggccctggacatctccaccatcattgctgcctctgaaaacctttcttgctaaaactgccaattcttccagagagaggaggcccccagagccatgttgttggtggatgggggcttctgagtgacagggcccatgcacatggctgtgccctagtgacaagagaggcagaaaaaatcaggcactgactcatctcttcataaagtggggaagaatgcagacaaggcagagactcagatgtggggtagccaaggagaacaaccagtatggattgcactggcacatggagatgggcgagaatccctggcaagagcagcaatgcttattggactagatgggaacagggaaagtttgaccttatatttctttgttattctgatattgttttgcaataaagccacttaagcaaatggcttaaggaggctgagtgcagtggctcacgcctgtaattccagcactttgtgaggttgaggtggcaggattgtctgaactcaagagttcaagaccagcctgggcaacaaagcaagaacccacctctacacacacacacacacacaaatttaattaactgggtgtggtggtgcatacttgcagtcctggttactcgggaggcttaggtgggaggatcggttgaacccaggaattcaaagctgcagtgagctatgatcacaccatttctctccagcctgggcaatagagcaagaccttatctttttttttttaaggcttaaaataagagaaaataaagaaagacaataaccaaaccccattcaagtgctgcctgcccctgaagcccagcgtgggttggtggcaggcgccctgagcttgaggcctgattgtggagtgcaggcatcagactcagagggcctgggaggctctggagctttcatcagttcacaaacctctgtcacagcctgataacaaagttgtggaaactgcaacaaagaatcagaaaaaatggggaattgggaaatcacagcaaatatttttcccatgctctcaaataacagaaagtttactgaaacagatcactttcatcatgaaaactgcagtgaactagctcaagagacatgcagcagctcacagtgtgtgctttgagtagactttcctggaagaagcagcacctcctagaacacaaattctagcttcatcgtcctgggtcagctttcttgggacccgggggacaaactccattaacttttcctcctggctttgcattgccaaacagaacttctggtcaacctcctttcagtcccagcgacctcacaatgtcaatggcctccaagggtagcagtgcttgttctggcagcttctccatgtggaaatggtctttagaatcctggaaggaaatcattttatgaagcatgcataccgtgagaacacctgacccacagtcctaggctcagtcagaatctaccctctgaaaaaaaatgtttcttctctggagcgtgggtgtaacataagcatctactgaatgccagatagttttatattttttatattttaatttttttagagacagggtatcactctgttgcccaggctagggtgcaatagtgcaatcatagctcaatgcagcctcaacctcctgtgctcaagcgatcctcctgccttagcctcccgagtagctggaattacaggtgtgtacaatcatgcctggctagtttaaacttataaaaaaaaaattaaaaaaaaagatatgaggtttggctatgttgcccaggctggtcttgacctcctgtcctcaagtaatcctctcacctcagcctccaaaagtgctgtgattacaggtgtgagccgccacgcccagccagcaggcagtggtgacatataggagtcagataagaagtgaacaagacagactaggatctccacgaggtggtggctttgtctgactgactgagattgatgcagtaatgatacccaaaggggaaactgatgaagtaaaatgagggggggtgggcagtttcactcaccttgtctccttctggcagccaagagggagaggtgggcagcaccgggaggccgggatggttttgctcagggccctgactgcctgaactgcttctctaaataacctgaggcctctttctgcactcaagggccccatatcctctgatccctgtgttgctgcacccgaatcagcccaggctggggcagcatggattccaggtggagcagctgctgagtccctgctagtttctgagaatagctcacaagagcagaggtgagattctgcagagctttgtgggtctctaagccagtcatccatcttcctgccacctttggagccctccagggatgagcagaacccatgtttcatgaacacataaattactcagtgctccgtaatgcaccctgtaagccacaaaggccacagattaaatcatggcagttgtgaggacagagcctgaggctgtggctggaccagtcttgtgcaagtggccaagtggagaggggtttcaggctcccggtgccagccacagcctcgtccctcttacccaaggcccttacaatcccactgtgtcatttcctttgcacctgttgtcactacaccctctctactgagctgtaggcatcgctacaggggctgtgatgtggcagccgtgtgagcacaacctcgcagcctggaggtggaggaaagaggactggactcagagcctgaggacccggtcccattcccacactctccccagctgcctgtgtgacctgaccctctgtggaccttcatttccttgtctataaatgcaggaagcggggaacataaaggtctgcaacactgaatgccttccatggaggatgcagccccaccaaagggcacttgagctctctctcagtttgtgccgccaaatgacactcttctgtgggtgaaattccgccagcagcccccagctacctcggaagctttccactcctgacgctgatctcaacggaaaccttcctccaaaagcagcattttcagggctggggtgatcactgctgcggcaggggccccaccatgtgacagagaggcccacggtgggcgtggggtctacggagcagttatagctcctgtccctccagccacatctttattctgagttcagcccaaccttttccatgaagtttctataaagttcttctgtcaccaggacagaagtttctgtgtttgacctggggcagatgaatcaggcaggaggactgaggaagacatcagggttctccagccaccttatgggggctcctgtgaaacaggaatggggatcaacatgtccccccacctcctaccctggattgataagggaatcacctctggttgtcacatgtcatacagaggatgcctcctcactgagataccggtggagggtcttgactgccaggttcttggcattttgaacaaagaattggacaaaacgcacagcaaagcgaggaaataatgaggcaacaaaagcagagatctattgaaaatgaaagcacactccacagggtgggagcgggtctaagcagcggctcagtggccttggttacaggatcttctggggtccaaataccctctagaggtttttctttgtccacttggtgtacaccccatgcaaataaagtagtagtctgtcattagtgtgattggttgtggaaaacaaccaatcagaggctgaagtgaagttacaaaggtcacgttctatgtaaacatctgattggttgtggaaagcaaccaagaagctgaagtgaagttacaaagattagactctatgcaaacgtctggttggttgtggaaagcaaccagtcaaaggtacttttaattttccatctgccatgaagaaagtaagtccgcgtggtgacgggggaggaggggaggtgaaaagggagtaacctctggttcttttgttacttaggtgtggaaagttggggttttccttttgatacatatattttttgctttttaataagctttttttagatcaattttagatttacagaaaattacagaactagtgaagagttcccacatactccacacccagtatctcacactgttaatatcttatgttaaaatggcacatttgttacaattagtaaacctatattgatatattattattaactgaagtctacatttttttccaatttccttagtttttaacctaatgtccccttttctgtttcagaatcatttgatttagttctaaaaagtcagcataaatcggccttaggttccctgtctacagcccctattctcctgcctcaattgtggctcaaatacagagaaccaggttcccaggccattcaaaagaaaacaagctagctaggcatggtggcttttgcctttaatactagcactttgggagtctgaggcaggaggatagcttgaggccaggagtttgagaccaacctgggccatgttgcaagacccccatctctacaaaaaattaaaaatattagccaggcatgctacaggtggcatgcacctgtagtcctagctactcagaaggctgaaacaagagaattatttgagcctgggagttcaaggctgcagtgagttataactgcagcactgcacttcagccttggcaacagaataagaccctgttgaaagaaagagagagagcaccaaagagagagagagagggaaagatagaaaaagagagagacagaaagaaagagaaagagagagagataaaaaggaaagaaaagaaagcacactacacgtggtaggatggggcactcacactctaggttggcgtgggctcagactcttatgcagcacagtcatagcagagggatcctgccacgtcccctggagctcctttgtggattttgcaccacctcgcatccattcgcgtttctccctgaagggaggaatttcttagtagctgtctctctacttccctccaccatgctctttagaagggatccagcccacattccaaaaaggagcctggccatctgcatactgaaggggagggcatgtgacccaggctatcccatcacagtgaatcccaggaactgggcagaagcaactagggtcaagagaagttttctctttttttctgaggctaagaccagaatggtggtgctaagactaggagcagatctgtatcataaaaattgtttattttacttatcttccttactctttgtccttttctccctccacagattacttgcacgtactcattttaatagagggcagtcactcataattgattaactgcatagctggactcctgggtgctggtcgcaagagtaatctttgattttctttagaagaacaatgatccttaggtcatgcagacctccttaatggtatctggaagtttgattgactgagggacacgaacagcttcggtcaccaggaatctcacctcctgcatacctcccttacacatcaaagccccagttgtgttcaaagacaagtcagattggagtttgcctctcccaatctcacactttggttgaatcaaataaacctttctctcctcctaagcactggtgtgtcagtgtttggctaactgcgcattgagtacttgagtactggaacctagcgtctgggatcctgcaagactagaacctacgtcttccggctgccagcaacacctcttcctctccatggaaacagatgacttcctgcaattccagactcaacctttggaagacaaagaccaaccctgggtggcccagattccttagtgactttggaaagttagcgcccagcttttagatctggagaccaaggaagatagagcaagctgagagtaacattcattcacacacacacatacacacatgcacacgcacacacacacacacacacaccaggcttgaggaaaagaatcccatgagaaaaataattgcaagacaggcttaatagctaacattgactgagtgcttagtctttgccaggcactctgctcagccattttacatgcattttttttttaattctcaataacccagtgatgggagctattactgtacctgttttacacatgaaaaactgaagctcacagacactgagccctttccccaaagctgcacagctactgaatggtgtggccaggctgtctgactacagaccccacgcatattttttcttttacagaaagaataaatagaaatcatttgttgaaatagcacattatagacaacttcctgagttgcaaattttacccctcttttactcagagatactttaagacttctcttttaaggattttaagttgcttagagtggagcttgttaagctgtacacacacgtgagtcactggggatcttgttaaaatgcagattctgatttgcagatggggatgccctgaattcttggtctctgaggccctctcaggtgggatctctgatggtggtctacacacacatcctaacacaacactcacacacacacgtaccgtagtgccaatactgggagactgaaattctatattttatatgcgcacctaagcttcctcagaaaaagaaagaaatgcaaatacttcatcactaagaatttaaaggagcacattgtggcttccagcgtcagaagcaggaaccattaatctagtggggatgacaggaaatgaaatgtaagaaagctgattagcagcacctttaaaaattagacagctcagctccagaaagggaaataaaagtttggaatctgagctttccctggcataaaagggcagaatagctcttttcaaaatctcgagtgacttttagttgttttgttgttgttgttttctcatcacctccttaaaatcagctcttacactgcctcttgggggtgcagataatccgagcagacttggactgctgccatgaatacacagtctcactcctttgctgctcctcaatattttattttctttcctgtggagaggtcggcgaaggtgaggttgtgctgctggtgattaattgtggtaataaacagggtgagagaaagaactggaaacgcgagaggggttggagatttatctgaaaacatggatcctgggtaaataacgggatgactgtgagatgattacaggctgaattgtgtcctccccaaaagatatgtgcatacctcagtgatattgcgagtttagttccagaccatcaaaatagagtgagtcacgcaaactttttggtttcccagttcatagaaaagtcatgtttacactataccgtagtctattaaatgtgcaatgccattaggtctaaaaagtgtacttaccttaacaaaaaaaatactgctaaaattctgacacagaggaagaaagtaagcatatgcttttggagaaatggcaccgataagacttgctcaatgtggggttgccataacttgtaaaaaacacagtacctgtgaaacccaatacagcaaagcacagtataaggacatctgcctgcggtagagatttcagctcctagggccacagagtgcacctttggttgggaacagggtcattgcagatgtaactagttaggatgaggtcagactagaataaggtgggccctaatccaaaatgactggggttcttataagaagatgaccttgtgccgggcatgggggctcatgtctgtaatcccagcacttagggaagccgaggcaggcagattgcttaagctcaggagttcaagactagcctaggcaatatggtgagaccctgtccctaccaaaaatacaaacattagctgggcatagtggcatgcacctgtaggtccagtgaccagggaggctgaggtgggagaatcacttgagaggaggcagaagttgcagtgagctgagatcgtgccactgcaccctagcctaggcaacagagcaagactctgtctcaaaaacaaacaagcaaaaagaagatggccacgtgaagttggaggcacaggaaggacagccatgagataaagacggcagaaactggagccctgcagctgccagccaaggaacagcacagattccctgcaaactggaagaagccaggaggaggccaggaagcgttccctgcagagttcagattggccacggccctcccaacaccttgatttttgacttctggttttcaggacacaagatgatagatttctcatgttgaagccgtttagtttgtgacactttgttattacagccctagcaagctaataccatgaggttatctttccacctctgacaaactcctaaatccccctcccaggccctcctctacactcacacccctcaccccccaccccccaccaccacagtgattgaccaaaagggaagcaaggaatggggccagtgtgggaggcagtcaagcagagcttctcgcctccagtgaggaggcagtgtagggaagacactgaagagcctcgcaaggccccacctccagtccagctgaggggcctaaggacaggagggtgggaggggtggagggtagaaggggaggaggggaggagagtggaaaggggcaggggggaggggggagggtgcgaggggaggagttggggaaggaaggaggtggggagggtaagaggggaggagggcaggctcaaagatgcttcccgcctgctgtcatcagtgagtcagagcaccagagcctgaaaggggatgggaactgtagggctgagtttgactttgagccagaattgacaccccagggccaagagcctctcaccaggtgcctggagatctaatgaacaaatcaaggaggcccctaagcaatagaaggactggagatttggggatggtgaagctgaggctatagagtcccacagtggacgtgaggggaccctaagggattacccttctctgagttccctgtcctccatgcctttatattcctaaaaaagcactaaaatcctggtatcctctgagccgaaggctcagttttccatcccatccccaagcctcgtggaggccggaactcagctactgttggtttatgcactactcatcagctctcggcatctgtcccacaggctgggcagctccgggacactgcctggcagcaggggctgtgattccagctggagtttaaacacacaccctccaccagtgctctccagcaaacaaggacacccatcctcatactcccacctggagacactcgcacagcaccacaaacattcccacacacacggacacacccattctccaacatgcagagccacacaccctcacacagactcacacatgcagcacagtcacacacactcagcgtgggttcatagagcagccacccttgctcagagacacagacacacgtacacccacagccacgttctccagggcagaaacaggcgtcccctctccctccctctctcagacacatgcaggactcaggaaatccacaaaggccttcacagcagagctgggagattttatacatcaaggtcctcaacttccaaacagaactaattcatgccacaaataaaacagttacagacaaatctgcctagtgtggagttctacttggtgttgggttttgaggagggtcacatggctccttctcttcaggacccccacttctgggaaagcctccaggccatgccctcctcactgggacaggcaggaccctgcctccccatcctctgagcctcagggcaccgaatgtccacatccctcacgaggcgcttaaaaccagagagaaatcccggccctcaccaccacacaccaaagacagacgagagagggaggccgtgagaggggaccccagggcagtcatgattaaatgtgtggacactgccctccccagggttcctggagggcatcacatggggagggaccctgggtgccagctggtgaagaaaagggtgcttccagccgggctccagtatgacattgtctacacttgcattcatcatcacgtgaaggctcagacccctggctacattgccattgcacctagcccaataattattttatgtagaaaattagtgtgtgagccaactatgcatttaaacaaagctccatttgaacaccagatctgttttcctataaataccagtatgcaactgctaaaacaaaatagtaggtcctctgtgccatctagtagcctctgtgatgggaactattagcacaagaaattctaggttggccgcttggtgctaactgtgaaagggtgaaggatgggatctgacatgcgccaagtttccagctgcaaacaccagcacattgtcaaaatgtgttttgtgcttctccatccttccatcactcttcctaatgacaaaaataattaacacgttcatataaaagcacagaatgaatgggagtcctaatttatccacctatttcagggtcatgcctttatcaatatatgacaagttaatgggtcttaattaaaaaagcagcagtaaagcaatttaggaaactgaagggttattatgagtcatcactgtgacagcatgttttgtgcaccatggaagataacagatttgctttccatagtatcacagatccatcatcctgaaactacttgctctcggttgcagagagccattttcttccctttaaaagaagtgcatgagctggtggctgcttccagagtgacagcagcaatgcatgataggaaccaggaaggctatgggaaccagcgtgagggagggggcagcaggcctgaccacaggcaagggtcagggccctgggagaaagcatgagccaacggtcaggacaggaccgcacatcagggtcgttcccaacctgttgctctttcccaccaaaaaactcagtagttttctaaggactgtcaggatcctccccctccaccccgccatggccacacttcctccaggttcctctgagacctttccaggtgggcttcagccttgacctatagagacttgaacaaacactcacattgtttccaatggtgcgaggccgcattccctaagatgacactagtcctcttcatgtgcccgcatgagaaagctcaaggctgctaaaataagttaccatttctttcagccaacacctgaagacagggtctctgcctcccagcctctgtgggggtgggagtctaacttcaacaggaacacattagtaaacccaggtgggtttcacatggaccaccccacttcctgcttttgtagtgtttcacttccctaactctgccaagcccctgctccttccctccctaacccatcattctctcatgttatccttttctcagacagagtcttgctctgttgctcaggttggagtgcaatggtgcagtcataactcactatagccttgaattcctgggatcaggcaatacacccacctcagcctcccaagtaactgggactgcaggtgggtgccaccacacacagctattttttaaaattttttgttgaaacaaggtcttgttctgttgcccaggctggtctttacctcctggcttcaagcaatcctcccacttcactcccaaagtgctgtgattacaggtgtgaggcactgagcctggcccattctcactttaaaatgcccagtgacctccacaaatcaaagttaagttcaatttctgctgggctcttttcccagctgcaatagttgttactgattaaaatctgtccttaccactttagcgttcatctttgttcatctttgacaggactaagaaatctatttcagaaatatttctaaaatccaggtcttctttgtcattattttctggccctcaccatctcgtccctggaatgatgcagaggctgcttcatagccagtccccctactgatagctcatcttgtccatggccatttggatcatgtcctgcctttttaaaacaccctccaattgctccaatttgcaaagcagaaattaaaaactgagcatctgacaaatgtgtactttggctaactgtgcctttgtcatgatgttaaatattttccctaaagatggggtctcactcagttgcccagtctgtagtgcaatggtgcaattacagctcactgcaacctcaacctccctggctcaagccataatcccacctcagcctgccaagtagccgggaccacaggggcactgcaccacacccagctaatatatctatatatatatggttttattaccaacaaaagccctttggaaagctgaggagggaggattgcttcccgtcaggagctcaagaccaccctgggtcttcctatgttgcccaggctggtcttgaactcctgggattacaggtgtgagccactggaattcattataggtggtcttgaattcatttcatgggtaattgaatgattttgcataaaactgtagatttcttgcaagactggcctacagtcctgaatggcagcattgaaacagactgatcccatttaggcagtgtgtgcactcaccaggtggcccagttcccaccactccctgctacccttcactatcctcagttacgaacctgctggccccataggcatcagcgtttgccagccatcacaagtaggagaactgaggctggaaaaatggaaaatgagaccccaggacacagaagggttctaaggaaatgtgaagatgtttcttgctagcaaggaaaacagtctcagggactgagctgaactcacagttcagtgcccacagtgagtgcagtgagaggtgcatctccagagaaaagcaaaggccacaggaaaaaatgcaggctcagggctcctggtgccccgtgttttgtcacagagtaagaagccaagccttcctacaaagaaaggaaacacagcacgtctcctcagaactagcccatctttaaacttgacctagatggcattgctcagggtggccccttggaaatccatgaaagccagaaaagaggccaaggaggaacatggcatctctcactttccctgccgtgctttgagtattgaaatgtctgggcaggaattcctttgaaatgcctgaatcagagagtggatttgcaaaccaagtttctcctttatttttaaagacttttagcctgacttttactttgagagtcagggacacgtggaacataaattccgggtccaagagtcatgtgattcctggccaatgggaaaccacaatggtgcctcccagccctggctcttaacagcaccactgcgcagctgagccagcctcagaaacatgcgttaccctcccagacatgagcctctgtgtgccgcttctcccctctgtcaagtcgtgtcttcttatattaataagaaaaataaaatgaaatagtggtaaagtgttggagtggcgaaaatttttggggatggtatggagagataatgggcgatgtttctcagggctgctttgagtgggattaggggcggcgtgggaacctagagtgggagagattaagttgaaggaagattttgtggtaaggggtgatattgtgggactgttagaagaaacatttgtcatttagaatgattggtgatggcctggatacagttttgtatgaattgaaaaactaaacggaataagagaaggagaaaaacaggtattaaaggtctaagaattgggaggacccaggacatctaattagagactgcctaaggagattcagcatagtcctaccagcaaagattatttatttacttcaagagttaagagtggcagtttggggatagcaccaggaaatatcagctgtgatggcttggagaaacagtgtaaaccggcagtgtaaacaagagcagggcatgtatgagtagttgagaatggtgaataggagtttgactagacagaagatagtagggatgacatgatcagcagggagaccatgtcatgtgtttttatgggaactatgccaagataggtaacagatgaggatgaaatttgggcttgactgaagtaatgggggctgtctgtgaagtcttgcagcagtacagcctaggtaatttgctgagcctaatgggtgtcagggtcagtccaagtgaaagcgaagagaggctgggtatgaagggtgcaaaggaatagtaaagaaagcatgtttgagatccagaacagaataatggattgtagagggaggtattgaggatacgggagtatatgggtttggcaccaaagagtggataggcaaaacaacttggttgacaaggcgcagatcctgaactaacttgtaaggcttgtctggtttttggacaggtaaaatggggaaattgtaaggagagtttataggctttcagcgaagggagataagggtgattaggttttaatgagatggtaaggggtgcatgatcggtcaccaaggagggagtagaggtatcctatacttgtgagttaaggtggggggatacaagaggaagacgcaaaagaggctttggattgggaagaagggtggcaatgaggtgtggctgtagcctaggaatagtcagggaagcagataatttaaagtgtctgggcctaataagggaactgggcaggtggggataactaaaaaggagtgcttaaaagagtactgtctaagttggcaccagagttggggagtttaagaggtttagaagcctggctgtcaatacccacaacagttacggagacaatggaaacaggcccttgaaaagaaggtaacgtggagtgggtagcctccatattgattaagaaggggacggacttaccctccactgtgagagttacctaaagctcggcatccatgatggtctatcgggcttctgaggcgatcgggcatgtcagtcttcagccactaagccgagaagatctgggaagaagtcagtcagacagccttgggccagagttccaggggctctgggagtggctgccaggtgagttgaacagtccgatttccagtggggtcccccacagatgggacatggcttaggaggaatcccgggctgcgggcattccttggcctggtggccagatttctggcacttgtagcaagcttctgggggaggtggtgctggaggaatgcctggccactgcggtttaggcatttggaaattcttgtgtgctggagatgtggctggggtttgtctcatggtggagacaaggaattgcaactcagaaatatgttactacttggctgcctctactctattattgtacaccttgaaggcaaggttaattaaatcctgttgtggggtttgagggctggaatttaatctttgaagttttatttaatgtcgggagcagattgggtaataaaatgtatattgagaataagatggccttttgaccttttagggtctagggctgtaaagcatttcagggttgctgccaaacgagccatgaactgggctggatttttatatttgatgaaaaagagcctaaacgctgtctgatttgggataaagaaaaaggagcattaaccttgactatgcttttagctccatccacctttttaagagtaaattgctgggcaggtgggggagggctagtcaaggaacgaaactgtaagccggactgggtgtgaggaggcgaggtgataaaaggattacagggtggaggagcggaagctgaggaggaattgggacctagctcagcctggagaggaggggagaggtcagatgggtctgtagaaaaggaagattagaaagactcagcgacacttggggttgggactgaggggacaggtgggagggaaagaaggaagatttgggacgagttgcattgggaacagagactagggagggaccaatgtgtaaaagaatgcctggacgtcagcacctcagactgtttgcctattttacgacaagaattatttagatcttgtaggatggaaaaattgaaagtgctgttttccggctattcggaactactgccaagtttgtattgggatcaagcggcattgcagaagaaaataaggcatttaggttttaggtcaggtgtgagttgaagaggttttaagttcttgagaacacaggctaagggagaagaaggaggaatggagggtggaaggttgcccatagtgaaggaagcaaggctagagaaaagagagagtagagacatggagggaaggggttcgggggttcttaccctccagaaaagtgggaaagaggtgggggtgcagaaataaggggttggggtgcagagataagaggtcagggcacagaaataagggatcagggcacagagataagaggtcgggctgtggaaataaggggttcttgcctctcccccagaaaagcgggacttgcctctaagggtgaaggagaaggggttgagaggttcttgcccctctcccagaaaagcgggacttgctgctgacggtgaaggacaagggtttgaggggttcttgcccctcccccagaaaagtgagacttgctgctaacagtgaaggacaagatgttgaggggttcttgcccctcccccagaaaagtgggacttgccattaagggtgaaggagaaggggttgaggggttcttgcccctcccccagaaaagcagagaagaggtagagacatggagagaaggggttggggttcttgcccctcccccagaaaagcaggacttgccactaagggtgaaggaccaaggcaggcgtccctgtgtggtccgacacctctgaaacgtgggtgaataatcagagaggcatccctgcaatgattaacaccaagggaaggctgccttcccaggccgtgaccggcgccggagttttgggtccacagataaaacgtgtctcctttgtctctaccagaaaatgaaacgaattgaaattaagagaagggagagattgaagtgtggcaccaagattgaaaagagaaagaggttgagggatattgagggaggttggagaagagagtaaaaagaggctgctttccagatttgaaattggtgagatgtttcttgggctgcttggtctgaggacctgaggtcgtaggtggatctttctcatggagcaaagagcaggaggacaggggattgatctcccgagggaggtccccctatccgagccacagcaccaaatttcatgcgagtccctgtgaagagaccaccaaacaggctttgtgtgagcaacaaggctgtttatttcacctgggtgcaggcaggctgagtccgaaaagagagttagtgaagggagataggggtggggccattttataggatttgggtaggtaaaggaaaattacagtcaaaggggggttgttctctggcaggcaggagtgggggtcacaacgtgctcagtaggggagctcttgagccaggatgagccaggagaaggaatttcacaagacaatgccatcagttaaggcaggaaccagccatctggatgtgtacgtgcaggtcacaggggatatgatggcctagtttgagctcagaggcctgacaccctcctatgccttgcctggcccctgactgcctagggacctgcagtctatctggtcctctgtaaagctctttttagttccgtgtaaaacagcaggagagtaaaattggggtccagatgaaacagaactattcaggctgatatccaagaagcgccctggctccttaacgtgttttccttttcattggcctcttaggactcaggtttgccaaggctcagaagcaagagccaggagtgaatattgcacataacagcggtgaacctggcctgcttctgagtgtgcaaaagccctttacacaggatttcctgaggtcagcccaagcccaggctcctcaccctcccagaatgcctcagctagctggcaaaacattgtaagtggaagtagagatttgtccagtgtcaaaaatcatttcacacaatagcaagacacaccctgggtggaagtcactgctacagaaactgtgcccttcctccagtcttcatctcggcacatctgtgaccacaaacgctgtctgtctaaattcacatcttgttcaattttagattcatagttttctctactcaaatactttacgcttgtaagacatgttgtgtggaagtgggttaaacttgtcttttaacatcaccaataaccatcttctacatttttttcagtcattaatttgatatcttcactaaaagaaatgccagtaatttgagggttttcagagtaaagtgccttgagctcccccagacagagaagaagcagaggtgtcactgttattattctgagctgataggaaacacatcatggattggaggcaaggaatcagccaccacctgcccggcacgcacatagagcaggtgttggctataattgcctctagacttcctgccatggtcagttgaaagtcaaacctgtaaatgctgcctgactgcaatagaactggagtccacagacatttctgcaacactgcctggtgaaaatatactgactgggtgggatgagatggagggcgcgtatggagcagacacgactggaatagcaaccaacaggctgtcagtcttcactgccttttctcgtcttccattttttttgattctatgaccaaaagagatgacagacctgtaagaaaatggatttggtcatttccggaagaagctttttctttgatctgtctgagagcaggtcagtagaaggtatttttgttaacctggatcctcaccatggatatttcctgagcttctacatggcagttctatgttttaaagttccctttgccgtggcagcacaactgcacaccagacagtcacccttcttcctgagagccactgtgatttcacttcaggctcaaggtgtcctcagcagatctgagggaggactaaaacagatatacacgctttgcttttctgcatcaccaccgttcacagactcccaggagctcctgcagtcagtagaaaggagatcattcaagtggctttcacctagtaccaaacccacacagccttcagacccagcccctccaatctcccgacctcctgggcaccatccctggccaacctggtccagaatggcctccgtcctctagaggccccaggcaccaagatccacaccctctattccagagcattcttggcttcaagttaggtcctatttatcaaacatttgtctagagagcagccccagcacataagtgtgtgtgaaccgcagagtagaggcatggcccctgctcactgtcccctctgactctgggcctgggtaagactgggctccccaaaagcaatataagtgtaccaggaattttctatggtgctcctgggagaagtaggaaggaggagggagacggagaaatcaagtaggggtgtgattcaagccccattcttgcttgcacctgcagcgtgactcccagtgtgagctgaaccttagagcttgtccggacttgaatcaaagcaacgagcctcaggtattggtgtgggtcaagatggggagacataaactccctggagcatcacttccagctttctgcacctgtgaacaaagcccaaaggtgggtcactgaggagagacacaggtatggtattagttgctgaagaacacagatgctgaggagtggtcctgggtgggaggggttgggcggagcaaacaccagcttcacggccaccttcataggccagtctcctgccaggggcacgagacgctccaaggagccagaaatcagagctttcatttcctttgtgactctaccaggtactcacagaagcaggaagggagaggcattgtttaaaaaagcaaacacttatatagcacttactatatgccaggcaatgttccaagcattttataagcactaattcacttagtttctcaatgtctcaatttccttataggtaaagtcaagctaataatattagctacttcacaggcttgcagggaagctaaatagcctatgtaaggttacagagatgatctgccaagagttgaacctgggcagtccagctctgaatctaaatgcttaaccaaaccattaaaatgagtgcaggctcataggaccagacagacacaggtgcaagtcccggtttatgtcaataaaactgcatatcatccacaatggttgaacactcccaccaacagtgcaaaagcgttcctatttctccacagcctcactagcagctattgattcctgactttttaataatcactattctaactggtgtgagatgattcctcaaggatctagaaccagaaataccatttgacccagaaatcccattactgggtatatatacccaaaggattataaatcatgctactatataaacattctactataaagacacatgcacatgtatgtttatagcagcactatttacaatagcaaagacttagaaccaacccaaatgcccatcaatgatagactggataaagaaaatgtggcacatatacaccatggaatactatatagccataaaaatatgagttcatgtcctttgcagggacattggtgaagctgtaagccatcattctcagcaaactaacagagaaaaccaaacaccgcacgttctcactcataagtgggagctgaacaatgagaacacatggacacagggaggggggcatcacacaccagggcctgttgggggtggggggcaaggggaggaagagcattaggacaaatacctaatgcatgcgaggcttaaaacctagataacaggttgataggggcagcaaaccaccatggcacatgtatacttatgtaacaaatctgcatgttctgcacatgtatcccagaacttaaagtaaaataaaataaaaaatttaaaaaactgcatatcatctctgagtcttcactttcctgtttttgaaattggtttttcttaaaaaacaaaaaagccactaatacctgtatctgtgtaagaaatgtccagcaggtgctgaagccttgctgggaactcagtaactctcagggatcattacaaaaatcctcggtaaaattgactgcctgcaatctttgatacagcaatgcctgtccccagtagcttccagtggcagatgtgttatgtgtgtgcatatgaaaaaactaaacatgtaaaaaaacccaaatccaggccacccagtacattcatatggcattacccaggtctacacccctggggacagtcggccatgcctggagacattctaggttgtcactgctgagggaagggtgctgctggcatctcatgcgtagaggccagggatgctggtaaacaccctgcaatggcacaggacagcccattctgtattctttctttccaacataacaataatgataaaagcagctgccaacacacatattcaaggcacaggtctgagtatattataaaggtgatctctaaataacctatctctgagaaacgatctccttttagcccctttacagttagggagaggagacttaaagaggctgagtaattttccaggatcacacagcagacagggaagcttggatttgaatcattgtcatgcagagtccaggacttacactcttcaccattatacattcgttcactaaactttcctaagtttgaccacaaattagaaggcagaaaatgaaaaagcatgtaacttggtagttctagcaactgatttacttccatcaaaggccctttggttctagaaagctttatctatgtgttaacgatagcagtatattaaattatgggctaagtgtggtatcaaattgtaaaataacctatgaaatctaagctttactttttctcatagttattaatggctggggtcagactctcttgggagcccctcaattggaagaaagactgacaagaacacacacacaggacttgaaccaaacccatgtgaattcaaagggaaggcaggtttattatctttcgctccccagagatgaagtcagccagcttttctgttcatcactagggaggatattaaacacaattctttacacgtggggaaaaaaaaataattgattctgagaacagctttggtgaaatgggactttggttggaacagcacacacataacctctccaagacagcaggtcatccgccctggaacctcacccttggtctctggctctgaaactctgatcaccttagggagtgtactggcaatgaccaatagaccaggaccttttgctgcaaatctactaatgttccctaaagggtgacctctggtgctcaaggttgtttcccaccacagggctgcaggctgccactctgcaaagtgaataacttccttagtcaaggctggtggatacatgaaaacctgtcattaaaagaaacacatgctggactggttctcctagaattagccatttggagtctcctcgggaatcattaaggggacattttgcctgactttgaaagcaatctttttttttttttttaacaatagaaaactacaaagtactatacaaaggggactttgggcaccatcagctcctctcaaatcccctatgatgagattattacttagaatagcctaggctattcgacagcaacatattaacgctgaaatctcagtggcttaaaaaatctaaaagttgatttcttgctaatgcatattatgatcctggacaaacaattctgcagggcagtcatcctccatgcagtgcctcaaggacccaggcacctccacacttgtggtgccaccatatcaaaaattggcttccaggtcaccacagcaagaaagcacaaaatttgggacttgtggatcacttcctaaatgctttggcacttctgcttatagcccatcggtcataactagtcatagagcccccccaagtgcaaggaggctgagaaatatatagacggcacatggtaaatatctctatcatcatttatttgtgttacacactctccaattatgctcttttagttctcttacaatgtacagtattgttgactgtagtcaccccgttaatctcccccatatgtagatgaggagcctggtgagtgtggcctattgcaaatattttttcccaccaacccaaaacgtagattcaaaaactaatgctgatttttagagaattttaggtgatacttaatttggtaaaatttattgaaactatacttctcctaatcacattatatcattttctataatcttataactctaacatcaaatttaagataagaaatatatttatgccctatatccataagcaacaagatcattaaatctctttaggcactattgtctagaaaaaagaagaaaaaacctatctaattattttcagcaggaaaaaatttacagagcttacagcccagcattttaccgcttttctttttttgcattggtgaatcattttgagcttataatttcaaagtaaatattttttaaagcctcaggacattcattgtgtaatgatcatttgaaagattttttggttatggtgttctcaaatgaataaaaaggctgttcatagcaacagttatttctatattaaaaagatgaaattgttcattaagtggtacaagtcaatttctttcatcagcctaactgcccattttagcaaagattccatctctgaattaagcaaatagctacacatttcaaagtcaatagctatactatgtttcctttaacgtgaacatctcagacatatcaatgttgtcagcctctttactaagcctttctctgaaaagactgaagaccgtgttttgttgttattgttgtcattgtgtgttttgtacttttgctttttttaaggcaatatttttgtgtgttagctacagtctggccggtcatgacatgcacactcaaaagagagccagatattttttaaaaagtatggtgaggctgagtagcccatttgacaataaatgtaaagtgctcacatttccattggtctgtttggaatttccctaagaagagttatttctttctgtaataaaaccagaagtcgaatgtaataaaccatagctggtctgtgggggtttgtggctaaagtgagtatggaaaagtctgtgaactttctgtttatttccttttcccaaccaaacccttgaaactagaggctggaaggaaggggtagagttgagggccattggactaggtggaggaagtgaccttgcagatcctttcacattctgtaatgcatgcaaaaaataatgagaatgagatagctgaagtttcaattctttagagagagattcaaattcatttgtcggttacaggaagcaaaaaaaatgccattattaatttaggcaattagagaactttgaaagtaatatttagtactttttttaaaaagcctgtcccaggagttcagcccacagcctaggaaagcttaatttttatagtatttcaaatgaagaaaggtcatttcttggatgtgcttgacagaagattgtaattataaactggtaattttaatgagaagtggggtttccataaaaacggaatgaacttttgaggaagtaaaattagagtgcatgttccatccactgtggcatttccaaacaggtcagtgttcccaacattgccacctgctctgccatactttcctgaaaaacgttaatgctttggtacctacatctgcttctcctgccttctcaatgcaccaaacaagacatcagacctttttcttgcatggaggcctgcctcctgcgatgtctgatccacacacttttctcttctctgaatgctaaacagagagaacattgcattgtgatcttcccagatttagggcagagacagggcagtcagtctgggaaggcacttagtggagtgagcccacagtgtggaggggtgagtgcctcctgaggaatcctgccctctctacagtccacgttttctggcagatccaagaggtcacttaaggagttttgaacaacctgtactgtaatgtcctgagggtgcctcagcgtcatctgtgctcatcccattgttatctaaccaaatggagtcactttgcctgtgtgcaatggaaagccaaaaaattgacacactggatttttgcagaaaaacaaaaaaaaattattgccggtcaactggcaacgagacaggaggaaaccctcaaatctgtctccctgagctgggggctgagtggggttttataagcacagggtaataaggtgtgatctgcttggatcttgcaatgaggtgatgctgggaggcataatctcactgatcctgccgcaggacaatgccagggtttgatgtgcttgaatcctggatcctgccatgtggcatccacttttaaatttggtctcactcctcagttcgagcacttggggctgcccatcgtcgcgcacttggctcatctgggcatgctccagcaatgtgaccttcgacctgcaggtccatggcaactgaacaacaactcacaaccttgttacgtggaagctgagccagaccggtctggtgcagttacacatccctacagggtctgattttactgactacgggggagcttgggtattgttttttttaagctcctcagatgattctaacactcagcaggggctgagagccacggagttactttctgagaaggagtaaatatcagcaaagaaagagagacaggaaaggcacttggcagcagcctggtgagtaaggggtcaggcagcaccaagcaaggttggaggatgagcacagtgaggacccacagggcctatcaactgtgttaagataaacaccaaatcctgcggctgggcatggtggctcacacctgtaatcccagcactttgtgaggctgaggcgggaggatcacctgagatcgggaattcgagaccagcctggccagcatggagaaaccccgtctctactaaaaatacaaaattagctgggcgtggtggcacacgcctgtaatctcagctacttcggaggctgaggtagaagaatcgcttgaaccagggaggcggaggttgcggtgagctgagattgcgccattgcactccagcctgggcaacaagagcgaaactccgtctcaaaaaaaaaaaaaaaaaaaccctagaaagccccaggaagtcaaagaagggcgtcagtgcagagcaatgcgccagctcttggttgccgtattcctggtgctacaataaaagtttgttgaccatgtgcactcaggtgggaatcagaggctcaagagaaaagctaaaaccacctggaagctaagccttgtctaaccaaatctattgagtctccctccagctaactgaggggtcagatgccactcatttctgtttgggaacagtcatttgctttaactctcagcctcttgctgcagccatgctgccttcccctcagtgtcctccttcctgccacagtaagtcactctggagtgccacgctccacttaaaaataaacaccttctgtctccatcctggcacagtttcagcttatttagcattctaacatatgtcgtctgttttcccaaacaatctaacatgagcatagcacgatggggttgataatttgggcaaatgagaaacagcctgccatcagcacagacacagtgacatttgatttgctatcggtagattccattgtgttctctcttctcatccttggatgataaacacagaaaaagactgcaagatttccagccctggctctgtggcagagaataaggtctggaggcagggaacctaaggctgcttcaggctgacttcttagaactaagttgaaaggaaaaccttaaccttccatgcctaagtaacaaaaggaccacaggctactccctttgaccttttctccagggcaaatgggaaattggctgttctgcaacaaatcagactgattaccggtcaagtcttcgtttgcaactttgcaacttctctccagcctctgaaaggttactgtccacaacccatcagactgattgcaggccgagtcttcatttgcatagaagtataactttgtagcttcatcctagcctgtgactgctcctttaggaaccaatcagatgtttgcacaggagggtgacctttgtaacttctcttcagcctctggttggctgctttctgcaaccaatcagattgattgtgggctaccacttcacttacctgagatgagcaagaagtggccaatgggaaacttctagggggtatctagacccaagaagattctgtatctgggctcttgagccactgcggctcagtccactcccacactgtggagtgtactttcattttcaataaatccctgctttcgttcttttgttgcttcattctttctttactttgctgggcattttgtccagttcttcgttcaaaacaccaagaacctggacagcttgcagttatgaccctctaccggtgacgtatcttggcaagccagccaggaggaaaggtaggcccaaagtttgggatttatttttctcctttccccttttaaatctttctctcttttccttttcaactcgggaccctctgtggacagtgcctaagcatggagacaactgcaactttctggccagcgccactctggtgaaactgaaaggtttccacatggaagcgccttactgccgccgcccagttcgggtgagggacctgagtccttttcttgttttcatttttctgagtcctgttcctttttccctttttctgagttattttcctttcctcctttttcagtctttcagcagctgtttcctagtggctccttggtaattgagaggaactggccagggccgctctccagtgatctctgaagtccagggagtgaacagggatggctgccctgcctggaagggggaaagacactttactatcctttccagttatcctttcacaactgcatgtgacgcagttggcagcggcagctcgtccagggcaaattcacacacgtttcaggtgacttaaactccttcttttcttatgctaaattcttccctaatcgtactcaactggctaaggaacaaaacggcccacccagcatccagttcttattacagatcatgattattttttataaagctcacagtatgctctggagaggaaaacctgcatgtggcgccccctcctaaggccagagacgtctggaactcttaagattggaccccgcaggaggacgttctttgggttctacggacctcaaactctccaaaggggatgcccttggcagaggttcagaggtctagtattaagtcctccttagaatttcctctcggagttgaaatgctgcttggaccgaaaagtgtctagaatctgaagtttactgtctaatggaaaagtgggatggtattgcataaatacaggtcttataggagttattaagaagttattttaggcagatagagaggaaaaggggtccttgggaagtttttcttttaaagcagctccagaaacctttcttgtctagcaggaaaggcccggctcttagatcccgccgacaagctttgatatccaaatcccggccattagaaactgggtccacccaaacatggtgattcccgctgtcttcttgccattgccccgacttgggcctggaaacatggccacccccacatatccacaggtgtgtaggacaccatggcgccctgtattcgcatattaaaaggttagggtgggagggccaggtttttgcgggccacgtgagtgatatgcctggtcaaaccaatcccctgagccctatgcaaatcaggcaccacctcctccagcctcctcatataagcagccacttttcccaccacacgggttttctctttgttcgaatcccctctccctctgtctctgtacagggaggctgttttcttccttctttcttgcctattaaacactccactccttaaaaccactccacgtgcgtccatgtcgttttatccaatttggtgcaagattaaggaccctggtgtacctccattcattggagacttatcacaggcttttgtgctgccgttctaagcaggggcctggttaacgtgtgatgccttgctttggtactgtttggccccagtgctccttggagtctggggaggtttagcctttaaaattcaaactgccaaggagactgctttatccaaaattttggttcacagccttccttggattatctattggggcaaagtaaaaccggcaagcttgtactgctatctcatggctaaggttccgagctgttggatctttgtttatgtgtgtgtatacatgtctagatgtgtttatacaacaaatgtacacttattgttgtatattgtgtctacaaaattggcttataagtgaaagagcgctcatgaaaactgagtaagtctaagcaattttcaagttcatgtgacttaaagtataactttactaaacgagctagctttaaaattattggtggaataaaaatagaaatgttttcagaattgtcaacatacattttggctgaattttatgtttttctgtgctagatattttaaaatgtcagtgttaattcaagctggaagctgcttagggcaaatctgcctcccattctattcaaagtctcactgagataaatacataactaattgcttcctttggaaaggctaataagaaactcaaaagaatgcaaccctctgtctcccacctgtgattggaaagcccccagcctcctcgcctcgagttgtcccgccttctgggaccaaatcaatgtttgttttacatatgttatttgatgttacatgtctcctttgttaaaagtcaaaattaagtacagtgagtgggataaatgttttaggtaaactttttgtgtaaattaaaatcttagagctatttttaacacccatttgatatctgggccatttccaattgagaaagtgttgtaatatgaggaaatatgtttcaaaaattatggaattcataattccatctatttttcttatctgaaaatgcccatatctgatagttcttatctataaatgcccatatctgatggttcaggatttcttgctttttggagtttcactaaagttttaggttactaaggataaaattctagttaacatgtaattctgtacacaaaatgtgccggaaagggttattttattagaaaaaaaagaataataattttgtctaatccagaagttatctaaaagttagttcaaattacagatttgaaaaagttatttatgaaacaatgtagtaaggactcattaagtaggggagaaaagtgtggaaaaagttaaataataaaatgttctttcaaacctggaaaccttggagacatttggctaattaacactttcatagttaaagcccttagtattaattaaagtaaaataagaagtattgtaaaaatgcattggcagtttgataattcttttttataatatagttaagcatgaaactaaatttagtgtggagccaaatttcacatacatgtttgcgttgtttcacactgtttactgttttgcatggatagtgctagagtacttattggtcatgtgccttaagtggatttcttgattgcacagaatgtgatattggtaaacttaaggatattgaattgtgtatggggaataaaatattcattatgtgggttttttagggcccgggataacactgcagcctccagggtaaactgagtataaaaatttacacctggtttcctgcttatttgttttggcttctagttttcatttctttgctgtttattctcctgtggctttgcttgtatccatatatataaataaatgatgttttccagttcctagtggaaggttttatttagttttgtgatcctatgcacttcttgcaagtcctcattcatttcatttatctggaattcctaagctacctttgttgggcctgcagaaattaacggagcacaccagctttttttttttgtttttttttttgagatggagtctcgctctgtcaccaggctggagtagtgcagtggtgcaatctcggctcactgcaaccttcacttgccaggttcaagcgattctcccacctcagcctcctgagtagctgggattacaggcgtgcgccaccatgcccagctaatttttgtatttttagtagagacagggtttcaccatgttggccagggtggtctcgatctcttgacctcgtgatctgcccgcctcagcttcccaaagtgctgggattacaggcgtgagccaccgcgcccggcccatgccagctttttatcctttaactaactttttgaattttagggttcctgatagtttaagtgtgttgagtatactctcacaaatagaatttgagtcatatttctctctctctaatttctccaaaatctgtaaagtatatgtaaacagtctaattcattgcaatgtattcatttgcatacagtcaagcagggttgccagggttgctcagggagagagaacccagaaacctggcacgccggcaaaagggtaagaatttcttaccagtcagtctctggcctctttctttctgtgcaaactggttaaatataaagtagaagtcactatatatctcctgtgtaaagttctaaattaattggtttaataataataaaagcttaaatcaaacattttgtcagaaaagtgaaaatataatgcgaactttcttagttcatttgacttgagtattctttgggaaataaagacagttttaaaaattattggtgaaatacaattgtcttcaaaatgtaaacgtggtctaaattacgtttgaatactaggtttgctaaacgctttaaggtcataaactgcttctttggcttttgaaaattatttaacttgcctgctttccagctagttaaggcctggggacatgtggagttggccacaccctagctatgctggaaacagtcaaaggttatcagaacataacttaagaggttttacattaaagttaaaattgcttaaagtcaccactgtaacatgcggttaagactactagaaatagttttacatgcaaggtgtgtaaaaacagtagaaagtgttttttcagtttttttttgttttttgttttgtaaaaggttacaaaagatttttacttctttaaaatttctcagtcatcattttggcaaaataaataatttatggtaatctggaattccaaaagcaaactttagttttaaaattgtctttcctaatgcccggctttttggatgaatcagagggcccctgaaaacatccagaaagaaggtatacaggattatttgacttgtttacgcacatgggattgccaaaatgatgttcaatcttctttaggttgtatttttgtgaataatactaatgtatgttccaaaaaaatatatgggatttctaaaattctaatgtctaagtatatgctatcaatgataattatggttattatgttaagttattataaatcatagaaataacttgtcagtgctacgtacctaatttggaaaataaactggtatcaaagaggatataagtctaatgttaattaaacatggactcatgaaaaccaggatgtccaccttgtccttcgtgaatccttaaagcttttgtttctaaaagttatgcattccatgactcatcacggaaaagataaaataatccaaattaaatacattggtgcaatgacttacaaattgtttaaaataatttataaccagtgcttaatcccatattactgggaaaacaattaaagcttcaggtacatttggtcacctgatgggccatttagacattttataaaggggtttcattcaattgttattttcagtgcatgttttctagttgtataaaagctttcccatgcaagaggggtgatgttgtaacagtagattattatgctacagtgtatttttaccgggtaaaaaagctttttatggcttacatcttctagaaacagcaaagaaggactgttcttgccatccacactacaacaaaacttcaggaccttggactttgagttcatagtctcacaattgagaagggtccctccacacttttggagctgtgcacccattggaaccctagaggtaaacctaaccagggaaatttctcccaagaagaagatggcatctttgatgtgaacagctttttcaaattcacagattaagacttctactatcatgaaattcttatctttgaatttttttttcttatggggtgtacttttatttgtgaaggattttgcagccagccttatacatgggtaaccttgtactttaatagataaaatatgaaggcccaatgtaggtaagaaactttaatcatacatgcactgcctcataatcagtcaaaaacaaaacattggtttactcctcttaacccacatcatgggttaaagagaacattgccagaaggccttcacttttctaaaagggcatcctttgttaggtcttttttccatggtttaaagtaaagaagcaaagataagaaatgtaaccctcatgataggttctatagcaaattctactgtaaaggctacagttacacaacagactttaaattctcttgtgaacgttatgctaaataatataattggctaaacaaaaagtacctatgcagctgctggcacttatggcctatggagaaatacatcaaatgaagattatagaaattcagtggtagagaattaatgaagagatcacttagttaggtaagtaaattctttatccagctcattctttgatctatttgatgttaggaggtttggtttatgggaaccttgggtaaggagcatactccaaactcttggtactatcctcccaatagtcataataatagtctccctggtgcattgtattctctcaaaggtttttaatgcttgcatttggccatctccagaatgtcatacagtctctcttcaactggaataacaggaactgaaagaaatgtgcaaccatgaggacaccataacctataaatgatgtgctgagattggaaactcaaaatcatggtaactgagagtgatgctaaggccctaaattttggtcatgctctcacctaagtgaaaaatggggaaatttttaaacaaaattctgggaggccattgttttggactaagctcatgcactaggccacaacaaaccaaactgaacaaaaatggagtcactcatgctgactttaaggaaacacatagattctaaaacagaccaggttttgttttttctcctgcaaatctctatgacaaacatttctgacaaaataggtatcaacctcctgaagttcccattaaatcttttttttttttttttgagatggagtctcactctgttgcccaggctggagtgcaatggtgcaatctccacctcctgggttcaagtgattctcctgcctcagcctcctgagtagctggaattataggtgcccaccaccatgcccagctaatttttgtaattttagtagagatagggtttcaccatgttagtcaggctggtctcaaactcctgacctcaagtgatccacttgcctcagcctcccaaagtgctgggattacaggcatgagccactgcgcccggctgcccattaaatcttttaaccgaatccatttcctctagcatagagaccattgagcttcagatgactgtgcaacaaggtttcagccagttccaggtgaaggcaccacccctggccatcaggaagccaccctgcctccactagacagagtaaggtgagagttccatgatctccaacaggtagggactatgccccaagtcagcatgaagcagttagagaagaaagaccttcagtgcctctgcctcccatgaagacctatggggatcatttctctcagcggggagatgaggcaggagaatagggtctggaggcagggaacctaaggttgtttcacacctgacttcctagaactaatttgaaaggaaaaccctaactttccatgcctaagtaacaaaagtaccagaggctactccctttgacgttttctgcaggacagatgggaaactggctgttctaacaacaaatcagactgattgcgggttaaatattcatttgcaactttgtaacttcactccacaaccaatcagactgactgcaggccgagtcttcgtttgcatggaagtagaactttgtaatttcatcctagcctctgattggttgctttgtgcaaccaatcagatgtttgcacaggagtgtgacctttgtaacttcacttcagcctgtggttcatgctgtccgcatccaatctgagacatgaggtgaacataaagtggccaataggaaacttctagggggtatttggacccaagaagattctgtatccgagcccttgagcccctgcttgggtctgctcccacacagcggagtgtacttttgttttcaataaatccctgcttttgtccttttgttgcttcattctttctttgctttgctgggcgttttaattctttgttcaaaacaccaaggacctagacaacttgcagtcaccaccctctcctggtgacagctcttccagtcaaaatgattgaaacatcatttgcctttaaatatcctattcatttggcaagcatagagtggacgccaaccatgtaagagacacgttggctctggcgtgaaaatgtagaaacggtctctgctagcaaggggcagataggttcatgagcgagaccggattacagagcatagcgagtcagatcacagctggcaggaggaacaagaaggaaactcacaagacaatgcatggccaatcctacactcaaagatgaggcaaagcttcactggtatctcagtccgtgcgtgctgctataaaggaatacctgagactgggtaatttataaagaaaagaggttgatttagctcacagttttgcaggctgtacagaaagcatggcgccaggatctgcttctggggaggactcaggctgcatccactcacagcctgaggggaagaggagctggtgtacgcagaaatcacatggtgagaaaggaagcaagagagaagagggaggcatcaggcttttttttttaatcctctacatttattaattaaaaataatttcaacttttattttagacttagggggtacaagtgtatgttttttaatatggatatttgcatgatgctgaggtttggggtatggatgacagatcactgaagcagactttttaacaacagttctagggggagctaatactgtgagaagtcactcattattgcaggacatcaccaaaccactcatgaggtatccaccccatgactcaaacaccttccattaggtcccacctctaacactgaggatcgaatttcaacatgaggtttgcagggtcaaatattcaaactccagcaaccagaacgaactggaagaagttaccgctgctctcagtcaagcccagaattcctgtcccatgcagactaagcattttcacacagatctttctaagtccttaggtcattagaggagtaacattccctctggctgaaagggagacatcaccaggaggtccctcagccttttgcacaactgattgtccaggagctctgtcctgttctgataggggctgagctgaaccctaaggctcaggattccggggaatagcaccacccagccggacctccccagggaccccagaatctacagtgactcagacccctgtacaacctggagcttgcacatctatttttttcctctcacttatctgttcactgggtcaatcagtccttcaacaaacatttactcagccatcactgctcaccaggcacagaataaaagcaacacacaggaccagagtatgggccttagagacctgcccgtctacagtgcaagtttctaccagggacatgggaacccaggtattgaaaagggccttgtggatgctttatagagatgagagatggaacaactttgcatttccagagggccctgggctgaggccacatctgcagaccttccttgaagtgagcaagcaaagttgcttgccttggcttcatgcctgacgatggcccctctgtggaaggctgcatgcttggactcaaccctgagtcttgggaaccactagaggaagagtaacaggaggtggaacccagggatggccacatgcaacctgtttgtcccacctcatgcctcttcccagctatgggtccattcagtcattcacttattcccataaaaccatacactacatttcttcaaatttcttatgggcctgaagcccccttaatgctcaccaaacatttaatgatttttttttactctctcagaaattaaatatgaacataacgatcgtcactgttaactattgtcctcaagaaagttccacatttctcagatagataaattttacattattaccacaaatgggccatacaatgcttgcaaagtgccaagagaagtctctggtctacaatggtgccagctctctctgcatgttggcactgaggaatgaagaaggagctggaaaatatgcaggagcagacccagacagaagtcaacaggccaggctgattggaggggaatgttggcggtctgaaaaaaaccaattcttcaccccctacttttcttcttcctttctcaatatttagtctccttaaggagcagtaggaggcctaggtgaataaaaccagacatagtgaatgcagtagaaggagacagtctttagtcccaaactagaaagagctgatagacaaggtagcgatctccctttccctggaggaaagcaagcagataacagacaataaacagttgataaagctatagaacaaatttaagcaagagaaggactttaagggagagaaaaaaaaataacattgccaaggcatcaactatcaggaactcagcttggcctttgtatattaccttatttaatacccacaacaatgctaaggaatgtattaccatctgcattcgcctaagaaggagatatagctcagaataagtaacatattccaaagtcacaaactggatgtggttctgactccaaagcccattctcttttcattatggtcactggctccctggaggggcaggaacagtgcacaggagtcatttgtgcattcagcagatgtttgctgagagtgaagctactatgctggtgtgaagatacaaaaatgattaaacccctggattatcacatggaattccaaaattttggaaggcagccttgatgcctagggaactaattgcatagattggaatccataggccggcacccctccttctgttcctgcccatctgccccaagcctgggtggcctacatcagtacaggggcgtccaaagagcaggtgctggctctcctgtgcaattcacctctcccagaagcagtatttcccaaagtgcatttctcagaagagtggggctgtgtgttttagactaagagcgttctctggccccaggtgtttgggaggcctgcaggatgcactcattattagaggatcacagtgcgtgctaaagcaggagagggtctgcccccacccacgctggagctggctcactcattcacgtctcagagggctctgctgctctctacagaacaaaggctttcagcccagcaggtggctcatgcctgtgatcctagcactttgggaggcccaggtgggaggattgcttgaggccaggagtttaagaccagcctgagtaacatagtaagaccccatctctacaaaaattttttgttaaaattagcaaggcatggttgcacacgcctttagtcccagctacccatgagggctgaggtggggggatcacttgagcccagaaggttgaggatgcagttgtctgtgattgaaccactgcactcctgcctggatgacccttgccccagcctggagcaagaccctttctctaaaaagaaaagcaaaagaacaaaggctttcagaatcttttggactgtggcccagagtaaggtatagattttacactgcaactctatacagataccacacacacacatacatacagatgaagccaaagttcagtgaaacaatacttgcctttactatgtgggttgcattctaaccgtttctatttggttttcttgtaatactgagtcatgaccctctaaatcaatttcatggctccacagtttggaaaacactcatctagaatacaagaagtcacttgagctgattgctaaactagccccactctgaatgagagggtcgaaaaactgacatgaaactgtgaaccaggagcctcaaatcccagcgtcactgcttttgggttgtgtgatctgagtcagtggcttctctttcctgagtgaatgtgaaaacctaatggtatcatttagcatggatgcatgctagaaatacactggaaatagacgtcactcaagtggcgttctcaaggaaaatttaacaaagggactgtctgaatcatgtgtgcagggttaaagcaaggaaaaggagagggagcgtttactagaacctggagtgagagctgtgagagaaggtgccccataggacacaggcagagaagaagcttggtggtaaataccctgaccccttttccttcctccctgcaatctcctattaatatttccattaaccaacaccaaccagaagccagagggcagaggggtccattgttgaaatccttacaggtcagcttcctggcaccccagcagaatgaagagtggaaagtggatcaggagggctgaatggagaagagtcctcaccccagtgatgacagcatagtgagggacagtgtttactgtgctgcctcccaacagccaagtgccattcagaaaagtggtgccctcactcctacagcccttacagtttggaagtgtttcccatccattttcttttttaaatttttctcttctttctttctttctctccttccttccttccttctttctgtctttctctctctctttcttctttctctcttttttttttttttttgactgggtctcactttgttgctgaggccagagtacagtggtgcaatcttggccgactgcaacatctgccttccgggttcaagctattctcatgcctcagtctccaaaatagctgggtttacaggtgtgcaccaccacacctggctacaatgatgccattgcactccagtctgcgtgacagagcagccttgtctcaacaaataaataaataaataaataggaagagcctcagggttggcactacaaggtgtagacatggatcaggctgagggtggagagtcctaagggaaggcatgggcccctgacatctggaaactggtctgacactgacagcgagaccatgttctttatgctagacatacctgatctcacagaacacctacatcaagtgaggtcactagacaaaaacaaaatcactgtgcagccctcctaaaaaccaccactcttggtaaaaaatgagtgactgctacttctttaccaattacagccttgtcctcgctctagtctgcccttcctgtctgtaacatttatcaagataccaaactacaacatccttctcgctttctgtcagtacccaatccatggcaaacgtcaccttcttacaccctcctcaacattacccaaccaaagcccagactctaaagctttcatcaatatcttcttcctgagatgccccactacttttctgtggagagcatccttcttcaccatatcaagtaataaacccagctggccaactgcaggtgtgttcctggtggtctgtgactggaagacagtgacattcagaaataagggagttcagaacatgttgcccccagatctgctgctgtagaatattgactattttgagttaaaaacggataagaaaacagcagatgaaagaagaccactctgatctgtttcttaaaagcaaaaaataattcccatgtgaagaaggcactctgtaccagaagcaaagtcccactcccatcaaggatggggaattgagaccaagaaaaatctgcacatacaaaccttgttagactcacccttatcttcctggccacttctccacccaactaaccatgttagcccaagcccctttgccttgtcacattttcataatgcactaccctttgtccaattcactatgtgtttactgtaactgcctttttgggtcttcatttccttaataaggcccccgtgtcacataaaacttgtgtgaaataaatgtgtatgttttcctttcgttcatctgtcttatgtcaatgtaactcgcaggtgcagccaaaaatccctatgagggtagaggtgaagttgtgcctcccctccaacagcaaggatccagggcaggcccatggagggttgggatctggggacgagcagaggcaatagccctgctcttctgggtagtgggggatcccaggaaagccaccgaaggcaaaggtcccaggcctgctctggacaggaaaacagagggcttgcccaaacaccataacaaatagaacaaagaccttgcagagtccagaatttacttcagaaaagtttattttaagcaaaaagaacatgataaaactacagttaaaagaaaaaatccagctgggcatggtggctcacgcctataatcacggcactttaggaggctaagggaggatgactgtttgaggctaggagttcaagaccagactgggcaacatagtaagaccccatctctaaaaaaaatttttttttaattagccagattgctgatctgtagtctcagctacttgggaggctgaagttggaggactgtttgagcctaggaggttgagacttcagtgagccgagattgcaccactgcactccagcctgggtgacagagcaagactgtctaaaaacaacaacaacaacaacaaaaaaaaaaccataaaagaaagaaaaagagagagaaaggaagcaaggaaggaaggaagatgtaaaagaaagaaaaagaaagaaagaaaagaaaaggaaagaaaagaaagaaggaaagagaaagaaagaaagaaagagaaatcgatcgaaagaaagaaacaaaaaagaaagaaagaaatccatctagtagctctgtgttgggggattaaagagacaaatactggtggctgggagcccagtgaggaagctgtggggaggaagtaagtacattgggatgctcagagactaccccaagaccctgcttggaacttggagtctttctctccttcattctctgcaaactcaacgtattcctttgaagcagaagtgaaagaacctaagcagctccagttctcagaattgcttgctgctcccagaatgcagctgcctgtctccttgctcctggccaaaaaacaccgagaggaaggcactggagagcagataattcagctcctcagagaaacactacacacagatgtcagaagagaaaattaacccagagtttgtggactagattctccttcagtcatacaagatgcatgtctaattaatggaaatgactttggagcaatgcctttggtttcatgaggggaaaatatttgagatgaaggatttgtccaaatgtattttcttgatgccgcctccaaagaaccttgaaaaggaaggaaaacaaaatgcaagctaagtgtcagtggtaactgatttgtagcttgcaatgttttattaacaatatctggttcatctgctgttggggagagaaacttttaattctaactggtacctaaccagtcctaagcaggctctctgaataccttacttagcacctatgaaaaatgtctgaagcttgaagtacaaaagactaaatagtaatttggaagtttgctgtgctttagagtgaagccctttcctgtcctgcacagacaaagatgtctgctgggtttcatgaatgttgcatggcacgtgtaattacgctagataatcacacctcacccaagccccacacctgatgatgaacaggctgtggaaggctctgtctccatcctcatgaggaattattcagcacctagactgtattccacttctgtttgggcccataaacatacatattgatcaaaagcttttgcaattctgacaccatctactctaaaacactatcttatttgtgggtaatcagcacctcatgaatattagatttctcccttaatttcgctagcgtggctttctttttggcagggaaaggtcaggactcaatcaggtgaatgttgctaagaaaaaaaaaagcagaacaaattcctgctctgggcaggaggatgctgtgggtcagggatgaacgggcctcctccctgtttttcttccgccctctcctcggttcccagcactcccctgcccccaccaccctgacccagccttcctgtctcatggtccagagatggctgcgtggttaaatggctcatcactgaatagaggtaaagaagtatcaaaggcatgagtacctgtatgtcagaagaactcagaaacagatgatgggcgagttgccgggagatagctgagccttgtactgagatcgtgaatggagatacatcttcctgctcccatctacagctcggaagacccaaccttacatcccagtccagtcctggctcctcaagactccagacccacggagaggtggcgctgatggtgagacagccaggaggatggtttctacagtaataacccacagagtgctcagaactcattccccaaatcagccactttcaaatcagaaactagaaagagggagatggaataaaaaataaaggaaggttgagataatcacacagctggaccctgggaggcagtccatgggctgggcagtatctcagtaaggtttaggatccagggtcacatctgtgaggcctccaccccagccccccaaccttctatccagccagccagcctttaattcatttggctatcactaagtgagcacctacaatgtgccagacatggggctaagcactaaaagtgcaaagacaagctggacagtgtctaaaccttttaaatccattcattcatcacttcttcaggcgtgtactgtctctactaggtaacagatattgctagctgaatttaaggcaaagggccaaacagatgtggtcaccatcctttcataaagcacagtcttcacgggtggacatatgtttattttgtgtttatttgtttgaagatcaattataaattgaataagtactagagaagcaatacactgagttttgtagcaagaaaaacaggaaacaccaaatctagcctggtacctttgtggagcctgctctgaggaggtgagctgaggtgaggagtgagggaccaggtccaggggctgaaagaacattctaggcagcaggggcaaccaggggagaagaccctgacttaggaagcactgaacgcattcaaagtggcactgccatccctacactttgggaggccaaggcgggtggatcacctgaggtcaggagtttgagaccagcctggccaacatggtgaaaccctgtctctactaaaaatacaaaaatgtgctgggcgtagtggtgcgtgcccgtaatccagctactcaggaggctgaggcacaagaaacgcttgaacccgggaggcggaggttgcagtgagctgagatcacgccactgcactccagcctgggcaacaagagtgaaactctttctgcaaaaacaaaacaaaacaggacaaaaagaaacacacaaagtgacactgccagaaggccaggggactgggcagagtaacaagggaaagagagatgaaagatggggtgggaaggcatagggaatgagtaggggctttccttggggtccaaagaccccaccaaggggtccacaaatagaattcggtgagtctgtgaaggtggataaaaagtgattctttctgttttttttttgttttgttttgtttttttgttttgagacagagtctctctctgttgcccaggctggagtgcagtggcgtgatctcggctcactacaagctccgcctcccggattcatgccattctcctgcctcagcctcctgagtagctgggactacaggcatctgcctccacgcctggctaatttttttgtatttttagtagagacggggtttcaccatgtgagccaggatggtctcaatctcctgaccttgtgatctgcccgcctcggccttccaaagtgctgggattactgtgcctggccaaaagttattcttttgtgttcaccaacctcgagctgaaattgagcatgtccctaatagtattattagtacctgggaccttgtcatcaatataagccatagaggcctccatttcacagcacggtttttgcagatatcatgctgtgtcatttatactgatcacaacgttggaattatgatgcttatcagacctgctgctataatgtattactagaaaagcaaatctgttattatattacattttaatgttaataagtatatttcaatataattgattttgttaattctgtgtattttactacatgcatttaaaaaattgttcagaaacggggtccactggctttgcccaaaggcatctatggtacaacagaactaaggacccccagctaaagctccctggaggagcttgcagtctggaggagaaggcaatctggggccagaatgagctgaactatgaatggggcagtgccaggggctctggaagaccaaggaggcaatccttgcgccacctgggatgggtgtcagtcatgtccacaacgatggttagaggcatcttctcagagtgcatcccaccctgccaccagccaaaggcaggcacagcacagggaaggccaccaagtcaggccctgcccagctgctgtgacctggtctgcttcaccccaggaggggtgagagcagccttccccaaccctctgcatcccatcaccatggagaccagggcgcagtctagccagagggaagacagtactctgtccttgttatttacttactcatattctccctccttctcttgttcatttactctctctctcctctctcattcccactttctctcctctttgatttttttctctgcctcttttccccctctctcttcccctcgccaacttcctctcatctctattcacttctgtgtttttcctctgcatttattccacaatccttcacttctaacctgccacagagccccgaagcatgaggaactgggtgggaacccacaaatctgatagtcaaggcttctctctgccctatttttaaggtgggaaaacaggcccggagagtggagaaccacaccctgtctctagatgtgcctagcacatcctagtcctagccctgtgctttggcccctgtgcctggagagggtctcagcatggcacgggcctcaaaggcagagctggaagggccttggcttgcctcctcctggcagccctcagcagtgtctatggggtgggggggtaagcaccctcttcctcatgcagaatccctgccttgcccacagtagagctggttcccaagcagaagagcagcaaactgaatccaaaggcagggacctttggaaggcattctctcctcagtggaaatgagcctctctctctgctccacctgcctccccagcacctgccctgggaaatagaaccccatcatcaggggaatgacaaagaaggaatgacggggtcccttgccaacctgctgagcttggcaaggacctcacagcctcttcttccagaaaagacaatgacagcagggagggggaatgaggtgacactaattcctgtggagcctgcctgggatggggagggccagggctggggggtgacttcccagggtgaagctggtgcccccagcccgaccctccctccctcctctgtgcttctgaagcgttttgcgcactggctcgtcagcactgcagcactatctggtagctgccaatttactttattatgacttgttggagcacgaggcctgggaaagcccaggcacttggtaaatttcagttgaggaaagtgaaactcagtgagctttaacacaaatataaatgactgttgaaacatttctaaagttacagagtgaagggagaaagtggcataattcatatcacacaccaaagcatatgtctaaactgctttctttccctcccaagtcaggagaggagcaacgaaacgggcaaatggaatgtcaaagtgtctccccattcgtggctgccggaaggtggctgagcatgatgggccaatcttcatgagatcacataagtgagtctctggccaggccagagggaagtaacagccaagagccctgatgaattaaaaaaatatatatatatatatataaatatataaatataaatatatataaatataaatatatatatatatatatatatgaagatttgaatgggggcccaaagagaaggggccctaacatgggagagtggaggaacagtgggagggttgaggggccaccaagcaggagcactggggctgcacaaagacctcttccagcactcctcatgatgggatccccctgtctctccaaagccctcagagaaagcgtattttggggtgagccactgtccatgggaagcaggcgaaagcccacagagcacgtgtctgagctgtggctggagtcagaggtggggctgagaggatgcagggcaggcacaggaggtgctggacaagaatgtgtaagttatgagtcaaaatgactggaacactctcctggctcactgcaccacctcctccactgctcatgggttgaatgagatgggatcccccaggagaggccagagcccctggggcccaggtgcagctgaggggaagggggcatccagcaggcttccctgaccagctgtccatctaggcccctggccctgctggcagagctggctgcagcctgatgccagactgggtgaggacattatgctaagtgaggtaagtcaggcacaggaaatactgcatgatctcattgagatgtggagtcgactgaggtgtggagtctgaaaaagaagaagaagaagaggaggaggaggaagaagaggaggaagaaaaaaagaagaggaagaagtagtagaagaagaagaacaagaaggagaaggagagaagaaggaagaaggaagaaacaagaatgaaggaagaaggaagaaacagaatagaagaaaagtggctcccaggggtagggaaggcaaggaaatggtggggagatgtaggttaaagagtgcaaacttgcagttatgtaggatgaataagtctggggatctaatgtacagcaagaggactacacttactaatattgtagagtatattgaaaatttactgaaagagttgattttaggtgctgttagtgtgtacacactcaaggaaactatagaaggagatggatatgttaaattggtcatctgtaaataatcacttcactataaatatgtatatcaaaacatcttgttgtgcatcttaaatttacacaattgaaaaaaaaaaaaggctgccagaccaagactcagggccactgcattccaccagggggtgctgtttgacatctgccaacacctttcacagcctcctccgccaaatatttcagaaaccaatttccaataaagcaaacaccctactcacctggctgcagagttggaaaatatcttgtttcgttgcaaatgagttttaccatctcctcagagctctgaacttagccatcatgcacagtctcttagttgggtcagtgtcccgggatggaatttcctgaccttgtcaccggttcttggatccacaccttagagcaattcattactgttggaactgcctgcatctggttctggcctctcctctcaattaagggagaaacaagacaggagggagggctgcaggaagctgctgtgctgtgagaagcaggtgcccttggatggcttctgcaaactccccaggtcccagttttctcattggtgaagaaaccagaatgggcagaccaatagccttacaggcttgctcagtggctatcctgacaaaacaaaagaccaaaacacaggttaggaggtgttacctaaaatgtacaggaggccattgatttgggcggagttcctggctgtgcatctggcctgcggtcacccagtactccgggctctgacacacaggcggcagctcctccctatgaaagtgccacccaggttggacatgtttttaaaagctgatcgttaatgagctggaaaggaaaggaatagaagccattatgatcactctaagaaagcatctctgattcatggatcatttactattgattattgaaaccaatgccatcgtgcacgccctgtggctggttttaaaacctctatatcgtggagtttgggatttatttggaagcactataataagcagcacatgacaattacttccctcagtattccctgtaatcaagataaattatcctgctattgatgtaaatgggatatgaaaatctatagagtcctcctgaggagaataaaccctacattatgctcacctcatttaacagcaaaaccattttggggtcaatcaaaaatacattcccccaaacttttattgccatccatccttagtcacctccagaaacaattagcaaacaataccagtgaggaagcactcagcctaggggcgcctgtactgctgttattatattcgccttatagagcctccatgtccacagacctagggcatcctttgacactcacaggtgtcttatcataaatgtatttacataggacacatatgtatttaaaatttgttttccccattgctaaacaacctcttatgaaaattcaaagtacgattaattatatatgaatttttttataaacaacaaatggccaggcacagtggctcacacctctaatcccagcactttgagaggctgaggcaggtggatcacctgaggtcaggagtttgagaccagcctggccaacatggtgaaacctcgtctctactaaaaatacaaagattaaccaggcatgatggctcatgcctgtagtcccagctacttgggaggctgaggcaggaagaatcgcttgaacctgggaggtggaggatgcagtgagatgaggttgtgctattgcactccagcctgggtgacagagagagactccatctcaaaaaaataaaaataaaaatatataaactcaatttgcattacttctccttctctgatttttgtctcttcttttccatcaagtgcttgccttttgagccagctttctgtggctgcttttcttctgccagaaaaggtgctgccctgagcagctctgtactctctctttctttgattttctctgtttttcctgtccctgaaaccccatactttattcattcagtggggatgccacagccttctttcctaggaattcctttcagtgcagaacgcttctggcagtctcaacttcttttacgcacctaacctctctttctgaatttgttatttaatatattgtccttttattcagcatctttactataaaaccttcttctttatagcaagacaagcataaaatcctctctaagccatgtcttttcaagctattttatctcagtcttaattctcctaatctcacctgtttaaatgaggagagagaaaaaggaagaggaggaggaggaagatgaagagaaggaggggagaaggaggggagaaggaggagaaagactcacagtgacaatgatttgactatcactggatgttaggattatgagtgatttattttacggtctttattttttcagcattttgcagactgtctgcaatgaacatgtacactttattccagttgccctaaaaagctgagcctacgacaaaagcttacaggctaaagctttgttggaggtgcaatcccaaagaaagaagcaggaatgaggaagaaagaggggcagagaaaaagcaaaaacaaatactgagcagtgcaattccaagccggtcacagtctcacaacaaaacatagctgactgctcagtcacttaggacctcaccagagaggccacaaggagctgtgagccacagtcagccaaggagggtcaggaggcactggctgtctcagcctctcctgggcaaagtctgcactgactccccacactggcagaccacgtggctccacaggaaaagccgggctgcaggggacctgacccagccatgcccaggtgcaccgttcctcctgtcacttagcaccacacgtgggggctcttggtctgcagagctggtggcagcagcggaggcagtcagggctcctggaacacagacagctgagctattgctagagctgctctggctggaggcaaggcaagtctgctgatcaaatgcttttatagctaagaaaataagaatagcttgttttaaaatattagattccattataaagtcttgatccttttagcctcagcttgctgtaggctcattcaaacctttttatatcccagatctacactggacacagtcctttaagacagagtcataaaccacaaagcccacggggccaggccaggaacacgcacaggaaagtgagctgagtggaggctgcggaagtgccggctgggtggaggcggagcgcacacacctctaagtcacgactgcctggcttcggcccacggctgttacaccttttgactttgttccaaaatattttaaaattgaaattcacgacttctctaaacgtgagaaatctcatttttcactgttgacaagtggactttttttccccaatattttgagctaaacaaaacatgtcagctctccacagacagtttttatttgtccacaagcttgtgacgtctgctaataaaaagactatggaaaacacttcattttcccaacctctgcattgcctcacatgatagctcatgttttcatgaaggttccatgtgtaagacactgagtgttacacatggagttcctcatgtcgttttggagcagcactgttacataggtaatattattagtcccattttatagatgagaaaactgagcctctggaagcttaagcatcttgctcaagatcattcggatggtgcatcgctggtgtggactttgcacaccttcaggggccaggcctccgttgacttttccactgaagatgtgcccacacgtgttaacctctctgaaactcacaaccctgtctaattgcaggctgcttggctatcactattccgccgataaggaacttgagactcagggatgtaaagtgaccctccagaggttccaagcgtaagaggggaggcagaattcaaaggcaggcatgtgtgactccaggcccaggaagccccagcctggggatccccagcctgctgaattcacagagcttcagagcggtcctgggtgctggaggcagaacagatggagatgggcccagtactcatgctggagaaagtcctctggacacaacttgccagtctcatgcaggtttccctggggcactcactaaaaacaagattggttcttctgacataccctgaaggtagccactgccaggcagccttccccaacttatttccccagtggcttcatttcccagcttccacacccaccactaacagccttcccctctgagaactagactcactgaaagcgcggactgcgttttaagtggctgtgactccccagggctcattttacctaacaaaggaagagataatctgtgacactgtgatataataagaaatagacatatatacatatattttttaaccccatgcctcttgcttctggcacagagctcttaagacctttgtaatttcctgagccattgactatctaacacagagctcctaaatcccttggaatttcctaggtaacaggagtctctttggttcttatgaagtgactcttggtgggctcctgggtggcctcaggatgggggctggttggcaggggaaccaaccatgtgattagggggttggaagtttcagccccactccttgatttctgggaagaggataggaggtgaaggttgagttgatcaccagtggccagttgatttagtcaatcaggcttttgggctggatgtagtggcacacacttgtaattctagcactttgggaagctgagtggggagggcaggatcccttgagctcaggggtccaagaccagcctggacaacatagtgagacccatgtctctacaaaaaaaatttttaaatagccagatatggtgatgtggtggttctagctactgggaaggccgagcagagggatcaactgcttgagcccagaaggttgaggctgcagtgagccatgactgcaccactgtactccagcctggggcacagagtgagacactgtctcaaaaaaacccccaaattatgcttttgtaatgaagccctccaaaaaatccaaaaagacagtttggaaagcttctggttgctgtatgtgtggaaggtccttgaagggggcactgaagccccctgccctccacacatccttggctgtatgcgacccaccacctggttgttcatctgcattcttcaccatatccattattaatataataaactggtaaatgtaagtgtttccttgagttttgggagccatgctagcaaactgtggaaccccagttaaagccagttgatctaaagtgtaggtgataacctactacctgcaattctcgtccaaagtggggcagtcatgtggcactgagccctcatcctgtgggatctgccctaacttcaagtagatagtggcagaattgacttgtaggacatgcggttgggatccactgaaaaaaagtgtgggaaaagcccacatatttgctgtgaagtttggctgagtggttgtgggaataaagaaaacacaattttattgtcatcatcaaactcatcaattagtaacatttcttagcttttaaaaccctttgaaaggctgataaaagctgttggttctcccctcaaaataagcacttattaaacccagtgctccatctgatttcggagacgtcctgtgccgcctgaagcccatccctgcactgaggttgagaactcctgatgcagtcgtggtccttcttcatcgataagtcacttccggcccacaggcttgtcctcagatcactcatgagtttctggcaggccaaggattcctgcttcctaaagtttatttagagttcatggtagacacagactaaaaacctactcaaactggcctcagaaaaggggaagggagacatagtttcagtgtggaatgatggaaaagctctggaagtggacggtggtgacagctgcatgacaacgtgaatgcacttaaagctactggattgtatgcattaaaatagtaaaagtggtaaattttgtgttgcatatatattaccacaataaaaaaaattcaaaaaggtaaaataaaaggaagagtacattttaggggctggagagtacaccagggaagctgctggctgctggacctcaggaggtaacgagaacattgtcacactaacccctgcccctcccctgtggcttctccctgtccactcttccagcttaggcccacatcacagctctcatgcttttattcccctccagcaagagaaatatttcctcaggctgggaggccacagctcataccaagacacaaactcattggaggaggaatctgattgctccaaattggagctaacaatcctgtcttggcagcaggcaagaatctgttaatataatcatggccaccagagaagtgccatcacagggggaggcagaagaaagcagtgtggatgcacatcacagaaacgaagccatgagacgcaccagaaggctacacgcagagcagcacagatagagctgaaccgtctattaccgagtagaaagaggaagaaacagaagatctaggtgggagcttctccagcttgaatcacagaggaaatcactaagggaccctcttaaaatgcagggactgcttccacagatcagaagcagggcctaggactctgcatttctaacaagctccaggcgaggctgctggggcacacaccacactttgagtagccaggctttagagcccaagctcagcttttgtgtaaatcaaaaatgcatgccggaagcagctctacctagtttacaaggatgcatgcattctccagcacattaccaaacacaagatgagaagcagggaagaggtgagggtgtggaagtgcaatgagaatacgggaaagagaaatctacaaaatgggagagggatcttgccccatcggccagtgagagcacgctgagagctgagggtgtgattaacgtgactcgtacccacagtccacagaaggagaaggaagggctctcatgcgatggagcaacttcctggaccctgctggcttggcaggtttcctgggccagccccaccggcttccttaagggacatttgaaatggtgacttagctttcacctataagcagatggcttggtgagggtggtgagatttaaaatccactgcccctgaacttcccacacacttcccacacacaactgcattcaatgtgtctttccaggatatagaaaaaatatttgcttagatttatgttaaccatttgatttgcatgcacaacgcaaaaaaaaaaaatcaacatcagtaatcaaggaggctaatatgcaaatgtatcaaatcatcatccccagaattttctaataaacaaaaggctgaggagcaacagccagtgacgctggcagagctgcaggcgggccacagcgaggggagagggagagccccacagcacagctcacgtggcacagagcacatcactaaatggaaatggtgtgatccatttcacctgcccccaaaacacatgctgctatggctcagctgtgtccacacccaaatctcaccttgagttctcataatccccacatgtcaagggtggggccaggtggagataattgaatcctgagggcagtttcccccatgctgttctcaggatggtgagtgagttttcacgcgatcttatggctttttttttttttataaggggctcttctccctttgcttggcacttcttcctgccaccttgtgaagaaggtgcctgcttctccttcaccttctaccatgattgtaagtttcctgaggcctccccagccatggtgaactgtaagtcaattaaacctctttcccttataaattacccagtctcaggcagttcttttctttatagcagtatgtaaatagactaatacacatgctatccaatagattaaagagactgaaacacaagtgtgtccccaagacaggaagagctgggaaaataaaatacctgacatgtggcatggtgccaagcggaggtcccatggtctgctttccctcaaaaactttattccatctctgtttctccactttcaccctattacctggagagtggaaaaaatgctccttcaaacaaatcactcaaaccaaggaacaagttttagctcatggagtctcactgatattgaaatatgggcctatagtttgaattgcttacaacacactgattaactcaggactaaaatgattcatcatactgttggtgaacttagcagcttagcttctgtgtgtagtaactagattggcacttactgagcacctgctgtatgctgggcagtgtactaggcactgcaactgaggaaaaaaagtattttttttttgagacagagtctcactctgtcacccaggctggagtgcagtggcgtgatctcagctcactggaaactctgcctccggttcatagctgggactacaggtgtgtgccaccacgcctggataattttttgtatttttagtagagatggagttacaccgtgttagccaggatggtctcaatctcctgaccttgtgattcacctgcctcggcctcccaaagtgctgggattacaggcgtgagccaccgcacccagccggaaaaaaaagttttaaagcctggacaacatggcaaaacctcatctctacaaaatatacaaaaatcagccagatggggtggtgcacgtgcctctggtcccagctactcaggagactgaggtaggaggatcgtttgagcatgggaggtcgaggctgcagtgagcgatgatcacgccactgcactccagcctgcatgacagaccttgtctcacaaaaactaaacaaaaacataaacaacacggtcttagatgtgggcattgtctatcatgtgccacccacctatctatctagagagacaagactaacatatacagaatagattagagcaacaaattgtgttcctatacgtccagtggatggacttcatgcttcaggcatggctggatccagggatgcaaacaatgtcaccaagacactgccgcccaccccctgctccctcagagaagcttcctaggcttgaagctgtcatagaaggaagcagccaggaaggagaagcaaaaagaagcgctggcaggccccggctggaagatagtgagatgggggagaaaacacagagcccttctttctcttgtgtctccatcagtccctacatcaattctgcttggctctctgggtcacctgctcctcctgcacacactaagcactgggcaagactatggcactctggttggtctttctgaatcctggacccttcccagaaggggaagggagctgcctaatggtcaggttcaacaaagtcacatggaggggcagagcacaaaggtcactagagaagaatctgctgggcagacaagcaacacaatatgattgagaatgcaacaatatcacactggagacatcaccatgggttgaaataaattaggcgagagtggagcgtttctaaaaatgcttgctgtagactgaatgtttctgtctccccaaaattcataggttgaaacctaatccccactgtgatggaagcaagaggtggaaactttgagaggtgatgaggtcatggggcagagcccttatgattgggatcagtgcccttatacacaaggccctgggagagcttcctcgtcctgttctgccacgtgaggacacagcaagaagccgccatctgtgaagcaggaagcagccctcacagacaccaaatctgccggccccttgaccttggagtttccagcttccagaactgcgagaaataaatgtctgtggtttgtaggtcacccagtctgtgggatttcataatagcagcccaagtggactaagagagtggtaaaattaaacacagcaattacacacatttggggtctcccatatgacaggcaagtattctttgttatcaaaatccaaaatccaagactcaagggctgcaggagccatctctgcccatcccccacgttcatcttttggcatctgtccccctcctcccatggggcttacttctatttttattatttctggctcttacctcagggcccttgcacttgctgttccacttgccaggaattctcttccctgcttgtcttaaaactgattcttctcatccttcagtgtccataagaagtgtggcttccttagggagtgtttctccttccacccttgatgagctggttgcccccctccctcactcactactgagtccccagggtggggaacgcatctgtactgaccattactgcaccccattgcatagtcctaatgcacagtagaaacttgataaatgtttccttccttcattcaacaaatatttactgagcactgacggtgtgccaggcatgacaacaagtgtttaaaatacatcagtgctcaaaacagccaagatcctctactctcaaaaagtgtaaatatttttttcaaatcaatgaccgagcccgctgaccagaaccccagacactgagtagctaagcagaaagcagctgcaagggcaatgcaggtgaagggaagaacaagccgatggcccagaaggcaggatgagaatccgagatccactctccatgatctgccatgagttccaccagaggcctggccatgccttggtttcccccagcccacagcctgcaaatagctcctcgaaacccttggggtgttatggcccctgctcatcctcctgagggcacaggcagcgaactgagaacccctgtgaatagcactctggaaaagtcaagtgccctccacctgctgaatcacacttgacttttgctaaaatcaagacaattacaagattgttcctgatcctatttagtacggctggatggcccttgagccaaattagagggaggatgggcctggaatgagagaggatgagataggttccatgaagctcccataagaatttcactcttgaggcgatgccacagccctggcaggctgcacagaataaaagtccaccttggttagatgcttcacctgtttctaaaggaaactgtactccatcattgttcaggaacttaaagcattcatttaaaaagtaatagcaaacactcagtaaaagcacactttgaccacccactcttcagaccagggccccacccgtttcagaaataaccattcttaccaaattagtgcatgcctcttccagaattttctatgcatttacatacacatgtattgtttaatttttttcttggttttgttttatataaatgagttatattgtcatttcggttcaaaagcttttcttcctctacattacattctatcttgaaagtcttattagtacatatatatgcttttttttaatttttagaaatgggatctcgctttgtcacccaagctggagtgcagtggtgtgatcatagctcactgcagctttgaactgctgggctcaagcgattcttccacctcagcctcctgagtagctgggactacaggcgagcaccaacacacctggctaactttttaaaattattttttgtagagacagggtctcagctcgctatgttgctcaggctggtctcgaactcctggcctcaagcaatcctcccacctcggcctctcaaagcactagattataggtgtgagccacactgctcagcctgtctattcttgtcagcttgtatgtagtactccacagtaactttgtcattatttattcagcattaaatcattatctattccactgttaataaacatttagcttgttttcagtttttccagattccacataatgctgtgatggagagccctgttcacaccttctccctaaggtactgctgagtgtcttcctagagcagatatctacaagtgaaatcactagttcacggagcacacacagttattttaacgtatgctaccaagctcccccatcgtggctggattccccctcccacagccgggcatgagcatgtttatccctccccttaatgtttatagggtcctctttttttctccaacctaattgatgtttttccctaaatcccatcaggcctagtatgaccatcaaatgcagggtgccattggacagccctgagtaagaactgattgccaagtaaaggaaatccttagactgaatagaagaattatccttcaatattccaagttttttctccaggatccatgacatgctcatggtccatccagaaaagacatccaatgtagaagacagagagctggagtaagaggaagaaacagaagcaaaaacactgggagagcacactggctttgggccttagaacagcgtgtggccttgagcatggctctccaacactatgcatccttgtgtcccatgtctgaaaccgtccctacctcatacacttaccataagacttgaagaaaattaaaaatgccaaaaataccatactgagctgctgtcgaggttgtcgactgccttaaacaagagttcttaagcacagtgcaaacccctttttagggatgactatttccaccaaaaatgattgaggaaatccttccccatctcatcaacacaggatggaactcaaagtcatgcctaggcaaaggatatttggtcacagagcagagctgagctgcagcctcccacgagcattaatgattaagtgaccagctagttgctttttacacactcccctggagggcagtggggcatctctggacatggcactgatggaaaccaagccccaggtgaatgtagaggagtggatctcagtgttggcggcgcactgggatcactgcggggagcttcataaaaaaaggatgcccagagatccagatttaattggtcttagaggtgacgtggaggtgagattttgaaaagctcccccagtgattgtgaaatgcagcgaggttaagaaccactgccttagggcagttacagatatcaattctgaccatgcccttcaactaagaagaagagccgggatctgtatatttccttttttttgcaatttcttactgtaaaaatttttttaaaaggagaaaaagtagtgtcctaacacaagagtctcagaattgagaacgtgtgagacaaagatagcgtgagaccaagaggaacagtggcaatacttgaacgaaacagcagaagacaatggtgaaccatgccaggctaactgcctccattacacccttagtaaaaaggaaggggatgttgtagtttgctaggcataattatatgtgacaattttgaagtagggtttaatatttgactttaataattctcagtgaattccttgtgtgtcatcagagattagagttcaaggaggctgaggctactggaatttgcagggcagagaagcagaaaggagaaacatacaccaagaaaggattcctcaagtctgttgctgaacagtaaatttcacttttgcggaaaaaaaaaaaaaaaaaaaaaaactccataaaactaggcatagagtgaccagagaactataagtttgaccattcctagagctcactcagggctacagaaccttcaggctccaaccaggtggggtggagagtctttgttaatatccaaggcattcagttaagagcccagaaggattctgcagtagtggcagaaataagcttgcctggggaaaaggctgctgtaaacgcaagccagggtagcttcaccagtcccagaggaatccaagtaatccccagggagctcaagctcaggcacttgattgcctggactaagtcaaacaccctttgaagcaagacaactaaatccagcaatcaacaatgtagattcaccacatccagggtttcatgcagaaattactatacataggtagtagatatgtaaaatgacaaacatcataaaatgtgaattgcagaatcaaggtggtaggtatatgtcttaaatttttttttataataaaatgtaggactgggtgctgtggctcacacctgtaattccagcactttgggaggccgaggtgggcagatcatgaggtcaggagattgagacaatgctggctaacatagtgaaaccccatctctactaaaaatacaaaaaatgagctgggtgtggtggcaggcgcctgtaatgccagctactcatgaagctgaggcaggagaatcaattgaactggggaggcggaggttgcagtgagccaagatcgtaccactgcactccagcctaggtgacagagtgagactccatctcaaaaaataaaaagtaaaaaagtaggaaaaactactacataggcatataaaagagaaatataactaaaataactacaataaaagttattcaataaaaacagactcagcaatgacagagccaatagagacaagcacataaatcagctactatctgtgcacatgtccagaagccatgttaagcagaacttgttttaagttgtttataatttaaatttgtggatacatattttactttttttttttttttttgagatggagttttgctcttgttgcccaggctggagtgcagtgatgcaatctcagctcactgctgcctctgcctcccaggctcaagtgattctcctgcctcagcctcctgagtagctgggattataggtgtgcgccaccatgcctggctaatttttgtatttttagtagagaccgggtttcaccatgttgggcaggcttgtctcgaactcccgacctcagatgatctgccagtctcagcctcccagagtgctgggatttcagataagccaccacactcggcccatattttacttttcttagggacagggtcacccaggtgggaatgcagtggcacaatcatggctcactgcagcctcaacctcctgctcaagccatcctcttgcctcagcctcccaagtagctgggactacaggcgcaggccaccctacccagctaatttttaaaaaaaatctttcagagatgggatctcactgtgttgcccaggttggtcttgaactcctggggtcaagtgatccttttgccttggcttctcaaagttttgggattataggcatgagccaccatgcctggccaagaagaactttttaaatacttttttctaaaagaaaaaaaatgattacaaagcaaacagaaatactctaacattaccaattgcaggggagagagtcaaagtacaaaaatgattcacaaagcagaagaaaatgaaagtgataagcacatgaggaaaataatcaaccacactaacataaaacattgtaagtaggataatatcagattagtcaagattttaaaattctgtgttcagtgctggtgaccatgtaagaagacactgatccacagctagttgaaggtccattctgggttcctgtttcctggaaagcaatgcttagtgggacgggtaacttcctcatgtgacacagctggtagcagtgctggctggctgtgttccatgtctaaagtcgcagaggctacaccaggctggcaccgtggtctacaaacctgccactctctatcacctttttatttatagagatgagatgggtcactctcagacaaaaataagaggcacagttgtgggccacgacagagcagcaagcagggaaggtaggtccccagatagcggcctgagaggaaggacatacatgtgtagtggccctagcttcactcagacgctgtgtataagttgggggcagagaaaggtgtgtggcagaggaaggcccagctgcagtgtgttcccccaggcagctctgcgggttgaggacacagccaggtcagtcctttctgctcccacatctctccctaatcaaacctgttactggggaacctcagtgacaggctgggttctaggtgcatctggggactgccaaacataacatggcctaccacttgggaggaatgcaatatctgatagtccagtgtttccaaaggttggtaactgaaacagagaagttaaataatttgcccaaggccacacagctgagtcaaggaagtggggcttgttaggcatttcggccacctgcaatccaccttccaaattgcatccctatctttgtgtctcttctactattatttaccttaaacagttttaacttgactttaagtaaaactactttctaaagatttggctcaataaaaaggttataagttttatgaaaaaaaattaagttatagtgatagaggtaggaggcagccaaatgcctagacagatagagaagggtccccagtgaaacccaccttcaagtctaaaacaggctaaggactgaaagacgggaccgctggttttggatgaaacccgtgacccagaaggagaacttctgcctccgtttgcctgccctttcctgattgattctttctgaataatgcctttcaaccaatcaaatgttgccttttccgatactacctatggcttgcctgggcatgcccacctgtgttctaggagaatgggtggagccaccaggaattcacgtcttatgcaggggaggagcctgggcctcttcacctcctgtgcagcagccctggcattcaactgtgaagggaaaacctgcttggagagcccctgtctttgctgggagctttccttttgcttaataaattccaccctcctcacccttcaatgtgtctgtgtgactcatttttttctggtcatgagacaagaacctggatttagctgaatgagggagcaaaaatcctaaaaaaaaaaaaaatcatagatgtatattttgtatatatttaaattcactttaaagtaaatatataactattaaaatgtgtaaaaaaatcatcacacacacaaccagcagtaatttttgacacacttagggggcaagggctcccacgacctctgaactatcctgtgggtatagctgcagggctgtttgttcacacatgtgatgcgtggcctctacttgttcacaagaaacacagtgagaggcagacaatttgctcactgtcagcctcaactggaagaaggctcactgctggatgctcctgtgtggaagtttcccctctctccaggcaggcaggcaacagatcccagcccaacagacagcccccatgaggctccaatgcaccctcggccacagtattgaaggatgctgtttggaccagggcctctaatttccccttcatgagatgtgccgggtttatgatgtctctttcccagccccttgacttccaagcactgcccaaggaccccaacctccacctctctgttttctgcttttcagagtgagaactgttcgcccctgatggtgaagtctagtgactgatccagaggctgctttctgcaaccctgctgggtgctcagatgtcccttcagttgtgtccttgtctaagctggagactaaaaagcgggacgaagagagtcttcctctctctcctttttgtcctctctatcccctctgcttcctctctcccctccttctcctttctcttccctctgccctcttctctctcctctttctctcactccagtgtgtcttaggcctatttcccaaataagagtacctgaaagatggctgctagcatctcagggctgtctgcattattcattcttctactcccaaccctctatttataaccaagccttctggcatctgaaataatgaaaactatcctattagcagctttccgatggtctagactgctctttggaacatcccaaacacttttgtattcaagtttctcttctgactacaggtacttctcactctccaaaatctgactgtcagagctcaggaaccagcagtgccagggacacccctccttaggtgaacctcccactctctgaaccctcaggaaccaaacagactgaagcaagttgcttgcttttgttgcctgaactcaccgtccaaattctcactctctgaatttaggacctgaagagatgacagcaagggacactgtgtattaaactaactcagctgtaaccaaagcatctgtcgacatagttccactgcagcttcctcacagcagaacaacagggaccaaattctcacacagcaacccccaaaggcattctgggacaggcagcatccttcagaggctcacattctggtcagataagttcgataatgcgtccgtgttgaatgcagcagatgtaacccttccagcagattcacaaggcccaccagcccaagctgggcttcacaaatgcgaaggtctctttgctgcaagactttctagagctaaaatctatttgaacatacaccctttgttcaaatagcccttaatatccgatgtatcttgtatgcttccaaacacacccttggaaatccagatttggggtgcatatgcagattcgtgggttttaactagcactttgtcctaagacataagcctgcagtcaccacaaaccaggtctgcagaggggtccagttatctgaattttcaagatgtttccctggtgattctaaggtatagctctggttaagaagaaatgttatctgtgacattttgtgcacaacaaggacgtaaagaaaatgagtgcgtgtggaggccgtttgtgggacttcagacacgtaacatataacagtgatagagtgagatccagaatctcttgccctgaaaggcaaaggtcttttttaaaaacaagttggcccagcatggtggctcacccctgtaatcccagcactttgggaggctgaggtgggcggatcacctgaggtcaaagttcgagaccagcctgaccaacatggagaaaccccatctctattaaaaatacaaaattagcctggcgtggtggcgcatgcctataatcccagttactcgggaggttgaggcaggagaatcacttgaacctgggaagcggagattgcggtgagctgagatcacgccattgcactccagcctaggcaatgagaatgaaaccccgtctcgaaataaataaataaataaataaataaatgagtttttcttaaggtttgaacaaacttctgggtttttgggtaagggaggtgggttagggtttctgggtctcattgctaagctccgagattcattagaacgaaagcagcaaggctcacctacccacacagtccacaggagaccctcgcaggggaaaaccctgattctagacgtaggtggcactttccttagtaacgtgaccaagtgcacttgatagagtggtcctgttagcagcagtgaatccatatgatctgagacaactcaattcttgcctccttagaagaatttgactaaggggcataaggtagagggagagactgaggcaagttttatagcaggagccaaagtttattaaaaagttttaaggcaggggccaggtgcggtggctcacacctggaatcccagtactttggaaggccaaggcaggaggattgctttagatcaggagtttgaaaccagctaggacaacatagcaagacactgtctctattttttttttttttaagttttagagcaggaatggaaggaagtaacatacacttggaagagggccaagtgggcaactggaaagattcaagagcacagtttgacctttgactgaggttttacacgttggcatgcttccagggaactgcatctctcctcttctgcttcttcctttggggtgagctgtccgcatgcccagtggcctaagctcttgggaggggccgcatgcacggtgtgtttaccagagctgtggctgtgcgcatgctcacttgagtcgtttggtcaccgaccggttaaatgctatattgcttcttaatgcacatacttgagcccacctgccaactcctgagatcttatcgggaagctgctgatcaccagtttcaggtttttctatctattgggagactgccttttcttggtactgcctgcaatcaattattattttagagagagacagtgtaacaaccacctgaccctcacctgctggtcgcctgacattcctggtgggggctctcccgccctgctcctgtctgcctaactacctgctctaacagtccagtgggaggaggttggtcctaagcccactagctgctagggtaaataacacggtctctcttttttttttttttttttttgagatggagtctcactctgtcaccaggatggagtgcagtggtgtgatctctgctcctcactgcaacctccgcctcccaggttcaagagattctcctgccgtagcctcctgagtagctgggactacaggcacatgccaccatacctggctaatttttgtacttttagtagagatggggtttcacagtgttggccaggatggtctcgatctcctgacctcgtgatccacccgcctcggccttgcaaagtgctgggattacaggtgtgagccaccacgcccggccaacatggtctcttttggtctctgtgtcctcttctgtaaaatggtgacagttcctgccctgctcaccttgaataagaactttgaggataaatacattactgaaggtaaaaatgcattataaactctaaaaatactacatacatgagagctgattttgattgcttaaggtgcaaataagcccaggctgactgaagatgatgaggtgaccctgatggccgaacctttacgaatcctttccttattagcaagttgacttagtgggagctttgtttcctcagattctgtggctagaaagaccccttattttcctgctgccagggtcatctgtctagaacataaatctgaccgtgtcactcccgctccttcttgtcagatctcagaccaagtgtcagctccatagagaggctttctgctgtcctccatctgcaactgcagacctttcttatacccgagagacactgcagactccctcctgacaggcaccatgacatcagatggctttatttatttctttttcatctctcccctctcaagagaaggcaatctctctgaaagaaggtaaggagatgtttatgttattaaccactctttctaggaagggctagatcaatgctgtgcaggtacctgatgctgagagaaagagagagagagattgcaaggggaaccaggaaaccatcaatgttgaagagagagttatcctgatttccaggccctgattccaggttctcatgaggcctggctgcttatgggttcaataaaagcagcaggatcatgggttttttccaatacattctcacttttgcttaaagcaaattaaaatggtgtgttgttgccttaaccaaatacaccctaagccacatctgccactagagaagaggcctgtggctggcagggactgttttctgctcactcattgtgagtccccagggcctggcacagtgatgggcaaggaaacacctgtgaatgggtagagtttatctttatctctgcactgcacaaaagctcagttctcattttccatttacaatgttccaaagttttccaacataattccacaggtcagaggttacaaactgactacccagctgttgaattagcccataggcttttttttttttttttttttttttttttttaagactgggttttgctctcgttgcctaggctggagtgcaatggagtaatcttggttcactgcaacctctgcctcctgggttcaagcgattctcctgcctcagcctcctgagtagctgggattacaggcacacatgaccacgcccagctaatttttagtatttttagtagagacagggtttcaccatgttgggccaggctggtctcgaactcctgacctcaggtgatccacccgccttggcctcccaaagtgttgggattacaggcatgagccattgcacccggccttgttttgttttttaaaacattgtttttacctggacagtttttgaagaaagaaaagaaggaagcaaagaaagaagaagaaaaggagggaggaagaaaagaaggaagccaacattttaaaatggagtgagttcacatgaaaatcaacattaccagcccctctttaaaaactcgaatattttacagcactaagctctaaaagacctttctacttttacatcttatttttgatggttcagaagaaagcaatctgttcttgcatttaaggtaataaaatctgagaccccagattcctaaagggaaatgagtacaaacagaaagcttacaaatgtgttttccctttctctctctcctattatctgtcccaacaagaaaaccctgccccttccagggacagatgctgcaggattatagaacagtggctcagctgcggactctgccagcatccctgcaagaaatgcctctaagtccccacagttgcagccacatcttctgctgactggagtcacctgtgaagctgatctgcatatggcttctggccttgtttgttgagaaacctgctaaaacaaatgcaagtgtcgggagcggctcattaaagtttttgcgctgctctgcagcacggccctcacttcctgaaactctcatacctctcagagacttcgggtttttttctttctgaaagtctcaatcctggtgccccagggacagcagaaaagcccctcagagccccccaaacagggcatggcccaccaaaggccatggcagtatccacccattgttagaacacactttccttttttttgatgtggttttcactgggaaaagatgggatgtggtggcgaagagaccaataaacaaaaagttaaacacttaagtatacaatggttttctgaaaaataaggagagagagcatgcaaaaatgttactttcaacaactggaaaaaagctctgaaagtccatgcgtcgggcagtagccaaatccatgttccatcttaagtaggtttccctccctccctgcctccctcctatccttcctcctccctctcttccttccctttcttttctttctctctttcttctttccttccttctttgtaaaatcttgccaggtgcagtggttcatgcctctcccagcattttggaaggctgaggcaggaggattgcttgagtccaggagttcaaggtcaacctgggcaatatagtgagacctcatttccaccaaaaaaaataaaaaataaaaattagcttggtgtggtgacacatgaataggaggctgagtaggaggctgaggtgggaagatcatttgaccccaggaggttgaggctgcagtgagctaggattgtgccactgcactccagcctgggcaacagagcaagagaccctgtcttaaaaaaatacatcataaataaaatctgtcccgaaactatcctgactttcatcctccccagattgggctttgtcttcggagcctccatccccagatttctcggcccagagcttgcagatgttttctttgctgcaggctcaaagtgcattttgtgatacatggctgtctcaggccaggttcccccaggagcagacacagagacaggggactgagagcaacaactggctgggaggtggcccagcacctcatcgtagaagagtgtgggaatgagacagggacagaaggcagccagcggagggcaggctgtcacacaggtcaccactgtggcccctagagtccaagccctgaagaatcctgggagcctgtggagcagggggagctggggtctgtgttttccagccccatccaccagcagctgagggctgatgccacgccttttccctcccagcacttctggctggtcccaagcatgtgagcctgcagcagagtgaggtcaaaaggctcgcctagaaccccaatcagggcgccgcagcacctgctccaacttgtccagccccgggcccacctcagttaacagagcagtccctcttccagccaggaggcccttgtggcgaggagaatgtagaggtggagcacatggaggcaatgtacttgtctgggacaatcatttccttactcttatcacaacaaagccattccttcactgtactttagagacctctgtctcctcatgccccaaagatgttcagctggggttctcctcaaggagacagaaagcaatggaccttagattctgcgccagctgctctcttctccgccagggtttacttgggcactggcatgttgaaatgctgcggtttccaagccaaagggcttttctctcccggcaggcctttccagcttcctcggctgcgcggttcttcctttgtggcaggaaggctgggacttacggtggggttaattctgatcgtgtatcactggaacattctttcattcatgtgctagtgttcacagctcactgttgcttcaaagaagctcagtgcgtgagtatttgatattttctttatcgagatgctcagttctctgagtcgctagagcgtctccctttacatccaaattccagccccaccacagttctctccctcttcacagccactgccctctcatctgtcagtcactcagctctcatcagagtaaaagaacagccctggggctgccacaaaaagggctcttcactggagcccagccagcagatcccaactccaagtccctggaattagactcagctcagtggccaggctaagccccagcttgtgccggtgacaaatgagcgctgggcagagcaggccaggagggctccactgttgcttgaaagaaactccgatgaggtgagaatgatggaaaagcaaaagaatgccgtgcaatgcgtgtgtgcataacagccctctctgggaggaatcaacagggctgggttaccaattagatgtggagggcgagggagacctcagacccctggcttggatgaggggagtgtggggaagcaacaacaaaaacagggactggagggcaggcagcctgtgggggctggatggtgtgggaggggcaggggaaggctgctcaacagacccgtgccatctttcattccaccgatgccctccatgtgctctacggtgtgctggaaacacaacaggaagcctcacaaagtatttgtctttatggagctgacatgctgctgtaagaagtcacaaaataaacaagatgctaataagtcaacaagatactttcacagagtcccttggtttggttgtctttgtggcaataagacagagagagagaaagaaagaaagaagcgctggaaaagctgtagacacagctgcagatagcaggagttcacagccctggccttgtattagaatcacctgggaaggttttaaaaaatgtactcatatcggcagggcccggtggctcacacctgtaatcccagcactttgggaggccaaggcgggcggatcacttgaggtcaggagttcaagaccagcctggcccaacatggtgaaaccccgtctctactgaaaatacaaaattagctgggcgtggtggtgcatgcctgtaatcccagctacttgggaggccgaggcaggagaatcacttgaacctgggaggtggaggttgcagtgagccgagattgagccattgcactccagcctgggcaacaagaggaaaactccatctcaaaaaaaaaaaatacttatatctaatgatttattatatacaacacaaagaatacagtgataaaaaacttgataaattagattatatcaaaagtcacatcaaatagacattaataaaatcagaatatctggggttggggagtggtttggttaaaggccccaggtgcttctaaggtgcagccaagctggcgaaccactgggctaggcccctgcccaaaaagatctgacctgactggctggggagaagcttgggggctttgaatctccccaggtagctctgatgggaggtgtctgagaacccctggagagagatgctgaagctgctgcctccacatccatcccaccactccctctttgagtagcatcagggcagtgtgggtagctcaagtcagcttgggggctgtgcctcattgtgttaaaggtggtcccattatgtagacagtgaccaccccaggagtgagccagtgacataccagcagtgcattgccaaagactttggggaaagtttttttctcattcttaagaaagaacaagaagccatgtttgcttccctattaaacattatattaagtgaaataagccaggcacaaaaagacacagttcacatattctatataatttgtgggagctaaaaattaattcaattgaactcgtggagatagacgaaggatggttaccagaggctgggatggatagtgggaaaggtagggggtgggagatggggatggttaatgggtacaaaatatagttagataccacgaatgaggtctagtatttgatagcacgacagggtgactatagtcagcaataatttcttgtacattcagaataactaagagagcacaacgggaatgttcacaacacaaagaaatcatgaatgcttgaagggatggatggctgccccatttccctgtgatccgtgcacactgcacatctgtgtcagagtatctcatgtatcccacaaatatatgcacctcctaggtacccacaaatatcaaaaatagatgtgactgaaggagcttgtagcacaggtgacactgatgggaaaaataagtcttgggaagaagccaacactatggctgcagaaaacagagaacacaggggcccttgatgctgtaatcaagctgcctggtcctgaaactctcactgcctctgctgccacatatgtgagccactagatttgcatcctatttaagccagtttgagttgatttttctattactgccctcaagtgacacaggcagtcatggaaggtgcctgtgagaaagttcaacaccagaaccaagtaagaccaatggatggaaatgatccagccctgtgaaagcctcacagaagggatttgagcatgaggaatggaacccatccagaaataagaagacgcttggtgcattgatgaaacaggaaaaaatgtcatcgttaacaattccaagagctggcctggccagtcacagaatgcgactctgagcagggaaatatcagacacattaaagggcataaaggtcactcaagtgagtcacccagtattactgaggagcactccacatggcacaaaagagggcagaagtccagagagtagtcctgttcttgggatgcaaatggtgtcactggaagaagacgggcgtgctgcctataacaagggcgggtcagagctgtgatgacattcgacccctcaggttggtcccgggcagcacactctgatgattaaatcaggaacaggcaggcagaggggtgtgtgtgtttcagagaaagctggtgatttgctaaccaaaaatgacaaggagaaaaaaatcagaattcttatagcacataaaggacattaaacatggagagactttattcttctagagcattcatttaaagctcatgcctgcagtcctgagtgtttcccttcatcaaacaaggatcaagaagagaggaaatatggtcttcaaagtaaaaaaaaaaaaaaaaaaatgtaaagggtcgtttctgaaattagcctggaatgtttcattgctttacagggagagagcagcctccaagaagcttagcagcatctgcctcttgtctgagcttctatgtcagtttctcccagggcagattttattaaataaacagcaaagagtccgggctcctgagcggctcagaaactcttgcatctttgaggagcttgcatatgctcacgccactctggaaaaccaggtagagaggcacttttcagggagtccccagggtgctgaagcaagaagggcaataatttggttttctttaaaatatatatatatgagacatagtttcaccaggctggagtgcgatggcgtgatctcggctcactgcaacttctatctccaaggttcaagtgattctcctgcctcagcctcctgagtaactgggattacaggtgtgtgccactacacctggctaatttttgtatttttagtagagatggggtttcaccatgttgatcaggctggtcttgaactcctgacctccagtgatgcgcccgcctcagccttccaaagtgctgggattacaggtgtgaaccaccatgcccggccaaaaaattgaggtaaaatcttcctatataatttgccatctttatttttaagtgtacagtttagtgctcataaatatttataatgagggtaatgatttgaagagaaattcaggactcccaggccctctgtgttcctgctgactgagacaggatctgaagcaaggctcgaatctctctgcgatcagttttcttgttaatagagttgagatgcacttgtccctctgcttcctcccaggggcacaaaggaattactggcctggagagacttggaaacacacaaggagcggcgctgatgggaggagctggtttagaataaggcagagacggaacaaagaaggatctttcctggggtagagggagggtggtgggaggacaatggggagtgtggggttgggattctttccaaatgctcaaaagagactcaaaatagactcagtccattcatctcctttatgaaaaccctacaatatcaatgggatgattgctatgagtaaaaattaggaaaactaagagattcagtattggtcaaggcttatcagcagtcttaattgctttaattttagtcaatagacatcatcttcttgtataaggcaacgcttttgtcctggtgactggcaggcctggtacactaaatgccttagcaaagcaagctgggccccttggtcattaccattgcaaacatctgcacgttccctccaatgctcccttgcaaccctgctaaaaataaaatcgtcttttaataacctcaagagcccaccactgtctcctctctggaatgttcactgaggaccccagtaagaaatggaaattgcctcgaatgctctctcctctgccttgacagtgctgctgccggccacgcactctgttgggggaagggcagtgttgatcagaaagcgagctccttgactgacgttatctcctcctgggcagaaaccaatttcagcaagaactttgtaatttggaattcaaggatgtaagatgcattcagggaaccattttccccctacaaattacagtttgtcatttaagaggtttaatatcacaaaaagggcctgcttctgcctttttaaaaaaattttaaaaaatgccacaccgatgctctcagaacagaggcttaggaatgagaagaatggcctgtacttcaaacaaacccattgttccttactagaggcagaagaataatgtcagaaaaaatagttatttattcagcaagctcttgaagtgctcaggcagagtggtggaccccaatgcctggcatatagcacgtggatcccaatgcctggcaataaccacgtgaaggaaggaagaaggggagggaaggaggcagggaagaagaaatacgcagacactgtgtggtaggaattccaagacatagtacattattttatccaaacacaaacacagtatttaatcaagattttcccatgatgcactggggcaagacaatcatgtggggggaggagcccaggcagcaaatgtctagaatgagaagaactgggccacaggccaggctctcaagtcagagtcatgctgaaacctgctccctttctttctttcttttttttctattttttattatactttaagttctagggtacatgtgcacaacgtgcaggtttgttacatatgtatacatgtgccatgttggtgtgctgcacccattaatttgtcatttacattaggtatatctcctaatgctatccctcccccctcccccaaccccatgacaggccccagtgtgtgatgttccccatcctgtgtccgagtgttctattgttcaatttccacctatgagtgagaacacacggtgtttggttttctgtccttgtgatagtttgctgagaatgatggtttccagcttcatccatgtccctacaaaggacatgaactcatcctttttttatggctgcatagtattccatggtgtatatgtgccacattttcttaatccagtctatcattgatggaaatttggattggttccaagtctttgctattgtgaatagtgccgcaataaacatatgtgtgcatgtgtctttatagaagcatgatttataatcctttgagtatatacccagtacaaaaattaattcaagatggattaaagacttaaatgttagacctaaaaccataaaaccctagaagaaaacctaggcaataccattcaggacataggcatgggcaaggacttcatgtctaaaacaccaaaaacaatggcaacaaaagccaaaattgacaaatgggatctaattaaactaaaaagcttctgcacagcaaaagaaactatcatcagagtgaacaggcaacctacagaatgggagaaaatttttgcaacctactcatctgacaaagggctaatatccagaatctacaatgaactcaaacaaatttacaagaaaaaaaaataaccccatcaaaaagtgggcaaaggatatgaacagatacttctcaaaagaagacatttatgcagccaacagacacatgaaaaaatgctcatcatcactggacatcagagaaatgcaaatcaaaaccacaatgagataccatctcacaccagttagaatggcgatcattaaaaagtcaggaaacaacaggtgctggagaggatgtggagaaataggaacacttttacactgttggtgagactgtaaactagttcaaccattgtggaagacagtgtcatgattcctcaaggatctagaactagaaataccatttgacccagcaatcccattaccgggtatattccctttcttatcagttgtatgacaataggcaaactgctttatctctctgaacctcgttttcttcatttagaaaacagagcttatgcctattttggaagacattgttaattcactcaagacccagccaaatgcagtggctcacgcctgtaatcccagcgctatgggaggctgaggtgggaggattgcttgaggccaggagtctgagactcatctgggcaaaaaagtgagaccccaatgctacaaaaaattagccagttgtagtggagtgcacctgtggttccagcttctcaggaggctgaggcagaaatattgctggagcctgggaggttgaggctgcagtgagctgtgatagcaccactgctccccagcctgggagacagagtgagaccatctcaaaaaaaaaaaaaaagaaagaaaagccattcctagccctctttctttcttgtctttctcagctttaaagagcagaacactcagtgccccatttccaagtgtgatgatgagggcagtcggcaatggggcctacgagaaagccatcatgttcttggtaaagggaagatgttggtttggtctcctgaaaagcaaggcttctgagagcagaggccacgttttctcctgtgggaccccaacttgccaaacccagggctgaaagtgtggctggtgctcatggaaaacccaacttgaaatcaggaatggccggacctgccttgagctgtatatgttgcagtcacctttgaatacaaaggccaaaaaaattctctgtggttggctttggagaggttgtcaggaagagctgtaagaaagtgatgattcacagcaaagaaaacaatggatgaaataaaaaggcagcctgcaaatagggaaaaacacatctgcaaaatatcagataggaggttcatatgcaagatttgttaaaaactcatacaactctgccggtgcggtggctcatgcctataatgccagcctttgggaggctgaggcgggtgaatcacgaggtcaggagtttgagactagcctggccaacatggtgaaaccctgtctctactaaaaatacaaaaaattacctgggtgtagtcgcaggtgcctgtaatcccagctactcgggaggctgaggcagaattgcttgaacccaggaggcggaggttgcagtgagctgagatggcgccactgtactctagcctaggcaacagagtgagactccatctcaaaaacaaaaacaaacaaaaaaaaccccacaaaaaacctcatgcaactcaatagcaagaaaacgtgtaacccaattaacaaatgtgcaaaggacttgaataggcatttctccaaagatgaaatgaaaatgaccaacatcattaggaaaaagcaaatcaaaaccactatgagaaaacacctcccacctgtcagggtggctacaataaaaaaaccagtgataacaagtggtggtgagggtgtggagaatgggaacccttgtacactgttgataggagtgtcaattggcaaagcaactatggaaaacagtatgaaggctccagacaaaattaaaaatagcactaccatctgacccagcagtcccacttctgggtacatactcaaaggagatgaaatcaccatctcgtcaaggcatctgcactcccatgctcactgcggcacttcacagcagccaaggtacgtacacgccctaggggtctatcaatggacaaataaagaaaccatggtgtgtgtacaaaacaaaatgttactcagccttaaaaaagacggagatcctgccacttgccataacagggataggcttggaggacattatgataagtgaaataagtcagacacagaaagataaataatgcataacttcacttctatgtgaaatcttaaaaaaaaggttacatatatacacacgtatatacacacgtatatatacacacatgtatatatacacgtatatacacacatgtatatatacacgcatatacacacatgtatatatacacgtatatacacacatgtatatatatacacgtatacatatatgtacacgtgtgtatatatacacacatatatacacatatatacacacacacatatatactatatatacatatatatatacacatacacacagagagagagagagagagagaataaaacagtggttagcagggtcaggataggggagcaggaggaaacagagacatagctcaaaggctcccacatagcaaatatgcaggatgaacaagtctaaagatggaatgcacagcaggagggctgtggctgataacagtggatcctcttctttgctaaatgagaagattataactgcttttgccacagggggaggcagatgccttaaaaaaataaaatgattattgacaaagtgataaataataagagtgaaggaaatttgatgattaagtttgcaaaggggaaataaaacaatttgtccagcactacaccatagcaaaacaatgtgtttaaaatataaaacaaaataaaactgggtcagatgtatttattttttgttgttgctattgtttttaatttaaaattcagccactctctcaagggcctgctcatgatgaaaaatacattccagtttttacagctgccataagacctcataagagcagtggggtaatttcaagggacttctcttgaactacaggggggcccttggctctatgtttagtgaagtcttgcaggagacttgatgataaaaaccacacctgtggacaattccttctctaggtcccatgctaggacagagcttactcctccagcccctactggcggtccactctccaagctgccattcctttacccaggacactcacagatacaactccaacccacaccttgggtgagacatgtcttgggctaaagcgcgagctattattcagaaccccaggactgagaacccttcacagtacaaatgtgaggttgtttttttcttccttccttttttttttttttttttttttttttgagacagggtttcactctgtcacctaggctgagtgcagtgccatgctcatagctcactgcagcctcagccttctgggctgaagtgatcctcccaccttagcttcctaaacagctaggactacaggcatgcaccattatgcccagcaaatttttaaattattattattatttgtagagacagagtcttgctatgttgtccagcctggtctcaaactcctggcctcaagtgatcctcctgcctcagcctctcaaagtgctgggattacaggtgtgaggcaccacacctggcctgatttttttcttttagttagcatcaagtgttcattctggtccccaaagttcagcaaatgtataaatactgagcagcagtgtgcccatgcccctctccctggtcagcctttacaacactgaacacgtgtgttatgctcccaaaaacccctccttaagaatgggaatatgcaagggaaacacaacactaaacctcttttgttagcattcctgataaattcgcacttattactccagtgaaaattgtctgtatgcagagaaagtgctttaaacacagcagattggtcagcctctggtcccctctggctcctacaaactttccaatccttttactttgaagctgggtcactgcagtgaggtgcgtgttgttgttctgcagaatccagttgcatttcatcacagagctttcataagaatccatttatcaaattattccttcgaaaactggagtggcacagatcaaaccaactgaggagctgcgtgacactttaagtcccgatgtcagtgctgcccaaatacaagctagattatcaagtgcttttcaagaacactttaatgccttgttctcatgaactctgacagtctgacgattaggattaaaatgggtcatttgtaggaattgcataagggccggaagttacagccctttcagaaagcacttctgccagccctcccaccaggagtcaggggtggcccaggatggatgggtgtgtcagctgggctctggaagctcactgtggcaccctgtctgcagcagatgtctgtgggggccccacttgcacccccttggttcctggcatctgcatttctgctgaccagagggccaacagcctgaatgcacttcttttcctgcaggcttgcttctgtccctggaacccactctgcccatagatgtggcaggccagaaatgccagggaattcagctctccaggagtgacccttggccaatggctgacagaagctaacgaggtgtgccccagatctctcattcattcgtgggtaaccctgagtcctgagtgtaagttcccccagagtggctaactccagtggcccctggctgactgggtagttactcaccttctgctgctgtcttcccctccatgcctcgcttccacactcccctatctgtgcttcctgggttcacttcccaagtaaaccacttgcactcacatcctggcctcggggtcggcttccaggggaacccagactaagacactgctatccttgctgagatttaagacggagcgcacatctcccaggctagggagggaacacccaaagccaccgctttcccagagactctgacccagctgggaccattaccaatgtgcatcacttgaccctagatgtgaaatcaagagccggaagaagccatcacagcagacacagcagtggccaccccatgagtttccagaagctctcatgtgtgctccaaggactggagttgaacaaatgggaggaggaagaatgaattgttttcctgctgtatctccttctacaggcagctttccgctggctgttgtccctcttgtcatcttctgtaggcttagagagaaaatcacaaggcaagagagaggatcttgcaagcatagagctgtgaggtgtgatgaaattgtcaagttcctgtgagcccgcgtgtgagaataaaggaaacttgcatctttgtgggtgacagaaacaccagttctgttagcagaggcctccccaggaaattcagtgtctgtaattctcttattgtgagaagataaatagcattcttattttgtgaatttgaacccatcaaagttttgtagttgagaatgccacattcatgtccatccaaggagcattccctgactctccacagtagggctggcctgtgctgagagtgggacacagggaaagaacacatagtcccggcctcttcagtagcaaacagaagagagacatacaccaagaaaaaatggcatgaaatgacattcgccacagtgaaaaagcaatgggccatgaaatatggggcacagattcagtcactgaaatcggggaggttccagaagcgagtgacatcgaagctgagtgttgagggagaactgttagcagaagaaggggcatgagcagacaacattccaggcaccatcaaaaaggcagagaagcaagaagaagagctcaaagtttaaagaacatcatcttattccaaataattgagaaaatgttgctgttcacgcaagtgcaaatgatgtggctattttaatgtatgttcacatttaacagtgttttcttttttgtattaagtaaaatacaggactcagtagacaaccctgatgctccatccttaagcttcaagtgagcctccccagagctgagagctgcagggtacaggaagtgggggatgccatgtggaggtgagtaggggaggaggaagtgaagggcgggagcaggcaagggaagtcagagatgaggggcatggtgagttgcggagtgtgagaggtgatgcagggagcagcaagagatggaaataggagggtggggatgacctgtttatgttttcttaatgcaattggtttggggaccatcacaaaacatacaacttgtcaaactgcccaaggccctccagctctctccctctctctctcctctcttcctgtaacatgcacacagacattcaccacaaggagctgtattcctggatgatcaaccaaatggactgtctagggcctgtcattacatttccatgactgtctctaaatcactttgtcctgatttcagaaccaaggcggtaacctcccaacccaatttccttgaatcttaccaaggtgatggtgaattagtgttgatagtaaataaagtcagagctttgagacattattgaagaaaagacacaggaaaataaaaacaataacattaattagctccaagtcagtataatttcctatctaaaataataaagaggctttaaagaaaataaccactaaagcctatctttgtgccaaaaagtccacagagccttatcttctcacaaaggcccctccaaaggtcatcaaccttattcccattttggagagacctcagcctctggaattgctgcaagaaaagtatgactgccccgaaggactgaagcattcagatttcataaaaaacatctgtttgccttttatggctggttttacagaagatggagatgttagtaaatattccatttcttaaaaaatgtcagtaattttagtgactttgtccctcagtaacacatgaaaagtgaatggatgatgcaaatcttgaaaagataaacatcagtatttacataaggagcgttacccaacgaattgagtggagcacagaggggattctttctaagtaataagagactgtcctgaacctcaaaacacttccagtatttgtggagacaaaattcacaacaaagaacacagaatctcacatggcgtcttgtggggtgggctggaaaatggtgagagcccacgtgttctccaggaggagcaaggcatgtatacttagaggactttacagtttacagatgactttcatttttcacgatcgcatttaaccccccacaacaagcaggcaagcagtcttctgttctacacaaagctaagaggggcccaaggctgtgcagcactaggaacaattctggaacttgaaaccgaagtcttctaggtccagccctgagcgctttctccagaaactctgcaacagacctccaaggtaacaccacactgctctcaccactcggcacagtgaccatccttaaacgaatggatgagcactcagaagaatgaatgagtgaaccctgcccccacggccctctggctcactccactctcctcattctctaatccctaaaactccaggcttttcactattcagtggccgcaggaagactccgggtttttcatattttatgcatacagctcctcagagggtcgctttctaataaaagcactgagcattgcagagaaaaatctttctttctaatcaggagaaaagggctttcaaggtccgaggctgaaatctgcgttgtgaacgttcagaaatgaaatgcatgtttcatttgcaacttttgaaaaggtctgtgaggatgcatttggcctaggtttaaacggaaaatgccttcatactttaatatttacaacataaaattaattagtttttctttgatgaaacttgaatcattcagctttcagaagccaatttagcatttccattttgttctcttctacacacaaacatgcacacacacatatatgtgtgcttacatatacatgcatacacagtcacatctgtatgcatcacatatattcacgtgcacacctacacacctgcacatatgtacagtcacacttcattcttctcatgcacagactgatttagtcaacacagaagagtagaaggaatcagtattggactgcgccgcctgctgtgttttaatattcaactatttaattccaactcttaatgtacttcccccttgctattctgctgatgtttcacttttagagactccactctgctgaatcattgtaccacagaattctgagttggggcagcttaaggccacctgaggctacttcccctctaaagcatgaatcctctcccaacagtaaccagaccaagaagttcagactctttgggatgcatccaggaatagagaacttgcgccctgctgaagaagtctcattctttttctcatgtctcctgactgcaaaggtcttcaggtcataaaattcaagtcctgtttctgcttctgacccgtggattaccacagacacatcagattctgttctaagccctaggtttagcaagagggtattggaacaactgatctttaaggtccaactaagacgttttaataatgcagacacttaaaatatcctgccttatttggagccaaaaatctccttccttacagtgtccaccccctggtccaagctctgacctctgggattataccttcatccttgtgtaagtgagtgatagctgcaccatttcctccaggcgggactccccggctctctgcaaagctgtgtcctgggtacctcttgtgcctgcctcccatcattgtggtccacctttcactccagccgttgctgtggcaaccagcttgtgagggtggagcccaacagctcctcatctcagctgcactatattcctcccaccttctgctctagaggtagctcaccttctgatgctccattgtggagtctacaggccagcctggaccagagggaccaaacatctgggtgttttcaggattgaggggattttggggttgcagcagggcttttagtttgaaaatcaggacagtcccaggtcaagtgggacaagttggtcaccccagcatgggtttaggagggccttaacatccacggaatgaccctcagcaatggggggctccaggagctggcagctgaccgctcccctcctcctgccctggacagacttggtgggtgcattctatacatacagctcctcagagggtcatggaagcatgaggccccattgcccacagtggtgattaatttggtaactccccaattagaaaaggcttttccacctatcttgttttgtgctcctcagtccccccatgtctgttttctagaataggatctcacaatgaatgaactacacacaagttcagctttgggttcagctttgggaggggattccaggctctggcaggcacctgggaaatttggataatgaaaatgtcacagggttgcacgttttggatgctggacttctcatcctaaggtccagatggcattcttctagagtgaagatcatgagaaagggtcttggtttcttgacagcttctcagtattcttgcttgcacatcaagacagccaggttactgcagaaaatcatttctgtagttgttggttcattttctcaaaatacgggatttgggggttacgtctgagaaccacacaggggatcttgcctctgatcaaaatcaaatcaaaacacctcctgtggtgacagagcaggcattttatttcctgacaatatttctcccatctgattcaatttcagcaaaggaaatttaagtagatgcaggtgaaagaattgagaactgagagctacctgacttgtgttcctcagtaaaaaacaaacaaacaaactgaaatatgtttaacggaagagggggagaagcccactaccctcttacacatattctgagtcaagtcgagcttttctggggacaggatgaggaaaccaggtgactgagtatttctccagtactcatcatgtggcttctgcagcacattacacaaagcatcttactttattccttagaatgaccccaaggtgacctttgcccttgtgaccccattttatggctggagaaactgagagtcaggaagatgagggaatttcaccaacatcacataactagtcatctgcagactggggctcaaatctgggcagttccagctccaaagtctataaccctaaccagtgcactgtctggcctctctagagaagtagagttcagacagggtcagggggcccctttgtggtatcatcccccttcaccacatctgcccttctatgtcattacttgagctctttcctctaaggagaattcctttcctacccacccccaccacccctcaccccagccccctgccccacagctccggctgtgaaaaccctgccagtccttctcggcccagatcatgcccccccgaccaaagcttcttcagctacgtgctgggcagcatcccttccgccactgaattcccatagttgttcactatcgatgctatgtaaatgcacacatcaaatacttaatgaacacttactatgcaccaggccctgcactaagcattttacacagatgatctctacatcaactctatctcaagttactattatctttcctattttataactgaggaaaacaccacccagagaggttaagtatgatggggcccactctttcactcccttctagactccaggctagagaaaggagtgtccacagtgacacaggccaccaatgcagtttgttggccaaaggtgctgcagcacaataagttttcacatcagccttgatgtccaaagctttttactggccccttggtactgcaaactttcctcctggatcttcctcccactatgtctagcttcagccttcaatcaacagaaatgtattgagtgcctgctacattctaggtgctgtttcaggtgcccagaaggttctttttattgggagatagacatgatagataggtataaaagaacatagaaagataccaagacctaccaccagcttctgttttgtttgtttgtttttgcttaagataaattatccagaacttgataagagacatctgaatctttctttccacaatctattaggacccaggcattttaaaattttatttattaattatttttttagagatggagtcctctctgttgcccaagctagagtgcagtgacgtgatctcagctcactgcaacctccgcctcccaagttcgagtgattctcctgcctcagcctctgtagtagctgggattacaggtgtgtaccaccacgcccggctaatttttagtagagacagggttttgccacgttggccaaggtggtctcaaactcctgacctcaagtgatctgcctgccttggcctcccaaaatgttgggattacaggcgtgagccaccacgcctggacattttacgattttataaaactgttaaggtgcaacaaataattttctgtctagtagtgacaataacttccaagggtgggattttattgccctgcctggtattaaccagttttgatctaatttcatacttctatcttagcatttattttttccctgctgacattaaaatcccagttcctcatatttctcttgtgaacttggcttgtcattaatgaattaaataaaatgaagagatatttgaaagttgcagctaccaggataaagttgctcttgtcagacctggataaaatagagccaggaaggcataaaaaaggagggagggagggtatgctttcctgtctgagatgagaactgttccaaggactgtctgaaaaccccacaggaaatccctcatgtccttcacacatctccagctctgcacggcttgcatgtttctcacgtgtgcacgtatttctatgacaaggtttatcactagacagtctttaggaccatggcaattcagataagatgctctcaaagaacacctgctcaggaatggcatctccaccaacaaattcatgccaactcaggcattgagcctccggcacccatgaattctgtttctacacagtgtaggtaaacttcccccttctgccaataaagccgctctttacccttccctcagcagatatatccggggcttgccacagtgcaacctggattacaatcctcttctttactttttcttttggagatggggttttgctctgttgccctggcaatcatagctcactgtagcctcaaactcgtcagcttaagtgattctcctgcctcagcctccagagtatctaggactacaggcatgcaccactatacccagcaattttttaattttttttttcgtagagactgggtcttgctatgttgtccaggctggtctgaagctcttggcctcaagcaatctaccttggcctctcaaagtgctgggattacaggtgtgggctattgtgcccagacatcttttctaatcactgaataaattcaacatatttggacgtatttttctctgatgtctttttttaggttgacaaatgcatactacaaccatatgggaattatgtttttttaaatttttaatatcctatttgacaatcatattcagagaattaaaatgattgatgtaatcatgagtcaatgagtggtccctctagaatgtgtggtcaggaaagacttttcagaagaggggcatgtgagctaaaggccaaaaacaactgggcctgcgaaaatgaggacaaggttatttcaggtggagagaacagctaagcaaaggactaaagcagctggcatgttcagtggcaacctgataaatgcttagcagctggctgggtcaggggagccctgatctgtggtgtttgcccatttctgtggcgtaaatactcccaggattttgagcgatgatgcaaggtcactgagtttggagttggaaagcagtgaaaatgagccaatctgagctggttccagcacacctcttggtctgttccaagaaaagaaataaagccagaagagcagaggagacaaaggagacagttgcaggagatgaggtcaaagaagcaggcaggaggctgatcttggaaggagcctagactgcattccaattataacaagaagccacgcggaaggtgttaaagcacagagtgacactccctcttcctttctaccttcttggtgtttttctcaagaggaaacaaaggcagaataaggagtagcgcaaatcctctcctcgtcttacgcatcagcagtgaacacgtccttggcgtctcacctcctacctcctgaggcatagcaacaaacaccatgacacagcaacaaacatcatggcacatcattttccagtttttctcaatagtgagcactcaattgtttttgagagcaggtaagtaaattcattctcttaagactatacagaaaagtaactgttaagtaaaattgttttaaaatggcctttactgtttcaaactgttaaaaatggtcacagaggtaatttaatgccttttaaaaggcaattgctgtcagccacagctggttgactgcctgcacactgaagctgctggaagagaaagacgacagccgttgtggtaataacatgctgccaagagaggtgacttcgtccatctcaggcgcagagctgaaggtggatgctggggaagggagacctgttgctgaagctgttggagagcttcttgcctctgtggcttatcccatttaatctagtgggctattggctcaggcaccagggggcctaaggaatggctataacctttcttctgagtttcaccctaaattgggcgctagagcggcagccacagaaaatgccctttccagtgtgcctcgtactttcttctcccaactgcgatctcctcaagggaaatgttaaagaaaaagttagtcagtgctacttgtaaagcatggtaggtaagactttatttaggaccattgcaataggtatgggatgcatgggcaagtaagaatttatggccaaggagaagcataagggtcagcagatggaaaattacatcggggtgagggaggttctgggtaaactgacctaacagtttcttactgaggcatggtggggggtgatcctacatcacctgggggatggcagaggatgaggagcctgatcagatatcaagggcgatcagatattgatggtggtgggtgctaccctgacttagcagggatctttgctaaaactagatcttacaaggcagtgcatgagtgagcccagcagaatattcagaagccggactaaactggcacagcaaagaatctttgtcagaggagccacatatgatttattcctataccccccacagtgcccaatgcgtgcttggtcaataatggattttcattaaatgtccatccaccagcaagcaaatttcactggatattccatatgtgcctggcactagattaattgacagggacttggagataaacaagataccacaccaccatcaaatgaacagcaacagtcagaagacagagaaatgagggggcacacagagagaaatagaggcagagagagctagaggtaaaggaaataatacaccctaagggttctacaaaggatctaacagggttaacaggtttataaagacatcaacaatcagagaaagagagccaaagagatctatagaaacagtgggtgctgaaatatcagttaattaaaaggttatggccatggcaaggaaatagtaatggctgctttaaatttttccaggtaacactgtcttggctgtgcctaatagtatagaaattcagcagggctgggcacggtggcttatgcctgtaatcccagcactttgggaggctgaggcaggcagatcatgaggtcaggagattgagaccatcctggccaacatggtgaaaccgcatctctactaaaaatacaaaaattagctgggcatggtggtgcgcacctgtagtcccagctactctggaggctgaggcaggagaatcgcttgaacctggaaggcagaggttgcagtgagccaagatcgcgccactgcgctccagtctggtgacagagcaagactccatctcaaaaaaaatcagaaattcagcagcctaaatcacgtgtgggagcaatcccagaatggttttctgatgagtgttcagggtggctgtcaccctgtacagactctgaggacccaaagtgccatcagcccgcatgtgatgtgagtagggatgtacggggatcaggtgctaaatggagtcctggctcaaatatgtctcacagtggagtgggtccccatggcagtcattgctccagctcttgaatttatcattggaatggccaaacaatggctgcagaacccaagaatttgtttcttgacttacggaataaaagctatcacaataggaacaaccaaatggaagcctctgaagatgccccttatcctttaatcctgacctgaagaataaatcaaacacaccacatcctaaggagagtgaagacaggtgccacttccaaagacataagggatgcaggagcaatggtctccgtttaactcacaagtctaacctcttcaaaaataagataggccatagaagacaacagcaaactactacacatttgagcaagtagtacccctactcacagctacgctgggtgtttgtttttactagaacatatgaatgcatacacatgtggaatgcagctactgatttggcatatgcattattttaatacccaccacaaaagagattcagaaacagttagcattcttatggatggacaacagtagacatttacaggctgttaaccctgctctccattataatataaccagaagggacagtccaaagaacttcacactggtgcactatgttgatgacatcatgttaatcagacctatggacaagaagagcaaatattctatatgtttcattaagaaacacactagaaggtgggagagcaacctgcaaaaccttagggtcctgccattttggtgaagctgccttttgggaccagtagtctggggttttctcaaacatcacttaaaaagtaaaggacaagttattgcttagcggtagcaccttctaccattaagaacaaagcacattaactggaggtctctacaggttttagagtaacacaaaccacgcctggcaatactctgacccatttattaggtgacatggaaactattagttttgagtgggcccagagcagtaaaggccctgcagaaggtttagactgcagtggaaatagctctgcttggactataacctggaagaatccatgcgaccaaaggcatttgtgttaggaaaagtgtgtagtagatgagttgcagtgcagacccttgtagttccagaaaaaggctgtgccatccacagcaaagaactatgggccactcaaagcgaactcctgacatcctgctgggccctggcggaatgagtgtctgaccatgggacatcaagagcttcagggaagagctatgtagatggacacatgagggtgggcatggagtgtgaggatcttagtgttgtaagttaaccctcactagaaagcatccactgctgtgacaaggaaccaagtggatagaatgatccagctagtagatgtcagccagcctctggccctggctactgctgctcttgtgaagtgggttcatgagtgacacagtagtggaggcagagatggtggcaaagaatgaggctaacatgacccaacatcatggggtccctctccccaaggctgattcagccacagctactgattggtgtctaactacagccacagaaggtgggtgtctcactaaccagtcacttgcaggcaagttgattatattgaacctcttctacactgaagggactgtgagtcatcttcactagaaatggcatatatctatgaatatgggtttgttttttctgtccacaggccctcagccagtcctgcaatcctagggctcctagagtgtctgtagatctactctatgcattctgtgacaggattccacatagcatcacctcagaccaaagggtccactttacagcaagaaaaacatagaggcgggcacacagccatggcatccactggtcctaccatgtgccacaccacacaggaactgctgggggataagcaatgggatagcctattgaagacatagctgaagaaccagcttagagatgacactctgcaaagagagtggcaccctttaaaatgtggtatacactttgaacaaagggccattatatgatgctcggtccccaagaggcagaatgcttgggtcaggagagtggaggctagccactgaaaccaatggaagtgccagcctcaccaagagacagggagattctgaaagcctgatggagaaggtggatgatgagtatgaggcatggcttcaggagtggcaacagtggagggctatggtttgtccctatttctcttcttatgagtttccccagaaatggtgatcaaccagaagcctggagaagctgtgtgccaaggaggagtacttgaaatatatatacgctggtgattctgatctccaaggataaagttaaaattcccaagaacttttataaaagtaaaagttcaggttaccttaaaaagaataaaaatctgactgccatcaaactgctcatttgcaacatggtattctggaaataataaaactttgtcttccaactttttatggaaaattatttttactgattgattgattgagacagggtctccctctgttgcccaggctgccatgcagtggtgcaatcacagctcattacagcctttacctctcaggttcaagtggtcctcccacctcagcctcttgagtagctgggaccacaggtgcacagcactacacctggctcatttttttttgttttgtagagatgaaaatttttatgttgcccaggcttatctcaaacttggattcaagcaatccgtcctcctcagcctcccaaagtactgagattataggcatgagctactgtacctggctgggaaattatttttagcccagaattctatatccaatatcaagaataaggttaaaaataaacatattaaactcataaaaatatcataaattcaccttctatgggaaaataaattactgaaggatgttctctgcccctcaagttctgggacctcagcaaaagcagcaggaaaaggctggcatcatcgggacacaccttccctcaggtgtctgtggctcctaccagcccaggctggggcttctgcagggctgtcagccacaacctctactgtgggccctccatgtgacccctccacataagctagtttgattccatgggtgagcatcccaagataacaagcatataggcatggcctttcacggtctgggctcagaggtcacatagcatcacgtctgctgcactctgctgatcaaggcagtcaccaagacccagccagggtcagggagagaacatggtgtagctgtaaaagcatgggggttggcagacattgttgcagtcatttttagaaaatatgacctgccacggcagtgagcaagggcaccagtgacatccatggtcaaatccaagtaactctcagtggtgtgactgtgagacataatgcaattgacaagaatgagaatttttaaagctttggcctatataaaaaattaaaaaatgaatgaaatatagaactaagattccaggttatttcaaaataatgtggatgttaggagtagaggtggaaaggagagtataatgtgtgctaagtgtcttgttcatttgaagtagttacaggtagaaattaattctggactttaaattatgactatattcacatggattagtaaaatgtttaaaactcttgtataatactttggcattaaaaataataactttaaggccaaccattagaagactagacataagatgtaatttctaaaacagtaaaataatggaagtgacaaaaaacaataaaacaagaagaagatattttaaggccaaaacatgaaataagatggtagtaattatgtaaacacatcattagtcacaaatgtgaatttaatctcctttttaaagagagaaatttttaaattggaatgttttaaattcagctgtatgttatttacaaaaaagcatgcctaaatttggaaaaaaaaaaaaaaagagagagaggaaaatttgaaaataaaaaaataaatgaagatataccagggaaatgctaactaaaagaaagcagaaatgtcaatagcaatagtagtcaaaatggacttcaaagtgagaggcattaaatgcattaaataggaatgagacatatttatattataaaaattacagttgcctccaaaatataacaatcattaacctttatgaacagagcaatattatattggtatttatagagttaaaactcctggaaacataagagaaactgacaaaccacaatcttggcgagagattttaaaacctctccaagaaattaagataccaactagatgaaaaaaaattaagccatagaggacataaatagttattgtactttcatataaacttccagtttctaatttaattaactatatagttgcattgctaatatgaattgttctcagtaaaaaggctgcacaatgttttcaaatacctgttggattttttttgtttgtttgtttatttaccaaaccagggtatttagcatatacattacctcctacagttattatttatttgttgtgagaacattcagaattgtctcttcttgcctttttagagtatacaacagagaaatgttaaccacagtcaccctcctgtgtaatagaacgccagaacttattcctcctatctaactgtaacttcgtactcactgaccaacctctccctgtttccagtggaacaacctttaactacccttttattagtcaaaataaataaataaataagttgccaaaagtcaaaaatcacacaggtcacattcagtgatccaataaaaataagtttcgcaaacacctcgtttcgaaattaaagcaactctaaatatatcttagtttaatgtgaatatcaaaactgaaattacatctcttgcctgagacctaaaatagtaaaacacatggaagaacacagcaggatggtggctaccatggcattgaaggaatgtgatgtggggagttgttgttcaacaaggataaaatcaggtttttttgttttgttttgctttgttttgagacagagtcttgttctgtcccccaggctggagtgcagtggcatgatcttggctcactgcaacctctgctttccgggttcaagcgattctcctgcctcagcctcctgagttgctgggattacagacacatgccaccatgcccggctaatatttgtatttttagtagagatgggcttctgccatgttggccaggctggctcctgacctcaggtgaccctcccacctcggcctcccaaagtgctgggattacaggtgtgagccactgcacccagccaagatcagttttaagatgagtaagctccagagatctgctatacaatgcagcccctgtggttaaaaataatttaaagggtagatttcatattaagcgttcttaccacaaaagtgggtggaaacacaaggcaactctgagaagtgatggagatgtttattaccttgactgtggtgagggtagcatgatatagacacatgtccaaactcactgaagtgtatgcattaattatgtgcagttttttgatacaccaattatacctcaataaagctgggacaaaaaatttgcttacactaaaattacaaagtaaatagaaataaatgtcagtgagagtactaaaggtagttactttttttggtcacttttattcttttagtattttagaaattacatcttatgtctagtcttctaatggttggccttaaaattatttctttaaatgacgaagtatatggatgtcaccaaagccatatttgatgccaattttggtcacatttgcatttattagcacacatgaaagaccaaaaatagaataagaattatactcaagaaggtaaatgtaaatacatccttaaaaagtagaaatttaataaaaatacagcagaaatcagaaaattcttttaaatgaatactaactcataaccaaatgtgtcatcctgagaatgtaagaacatggcaacattaggaaatttatgcaaaaaaaaatacactatatagaaaaggggatgccacgtggtcagctcaagaggcagaaacacattctgttccccccctcccccaatattttattatccaggaaaaaatttaaactttcttaacttgataaaaggtagctttcaaaacctacaataaataacatacttagagtggcagcattagaaatctattaaacccaatatacagtaactatcatcttaactatccagcattattccagaggtcctggaaaactccagaaaatgaaaacaagaaattctattaatattcaaaaggaaggcaggctgggcgcggtggctcatgcctgtaattctagcattttgggaggctgaggcaggcggatcacttgcggtcaggagtttgagaccagcctggccaacatggtgaaacctcatttctactaaaaaaaaaatacaaaaaaacttagccgggcatggtggcacgcacctgtaatcccagctactcaggaggctgaggcaggagaattgcttgaacccgagaggtggaggttgcagtgagccaagattgtcccactgcactccagcctgggtgacagagcgagacgctgtctcaaaaaaaaaaaaaaaaaaaaaaagaaaaaaaatatgtattcaataggaagaaataaaacctaatctactgattataaacatgattgtttatacaaaaaataatcagctaaaaattgttagaatctatgagtttagtaaggtggccaaataaaacaacattcccaaaccaataggtttcctgcacaccagtagtaatcaattagaaaaagttgaatttcagtatttatagttttctaggaattagtctatttcttctaagttgtagacattatgaatatagcatcatccttttcatgactgaaggatctgtagagatatttcctgctttatctggacattggtgatctgtgtctttttttctattgtgtcagccttgaaaaagataaaaagaaattgaccaggagatttgtcaattttactgattttttttaaaaagaactgccttttaaattttattgatgttctctcattgttcacctgttttcaattttataattgaaaacatctttaaaaagcagaaatgtatggtatctttctcatttctatctgtttgctttgagtttacgttgttcttctttttctaggtttttcgtggaaagcctctgaaacgtctacctggagctctctgtgtagttgtatggatacctccccaggtgtgcctctctgagaggacaggtctgccttgagctataaacatggcatttgtcggccaggcgcagtggctcaagcctgtaatcccagcactttgggaggccaaggcgggtggatcacaaggtcagcagtttgagaccagcctgaccaacatggtgaaaccccatctctactaaaaatacaaaaaaattagctgggcgtggtggcgggcacctgtagtcccagctactcgggaggctgaggcaggaagaatggcgtgaaccccagaggtggagcttgcagtgagctgagattgcaccaccgcactccagcctgggcaacagagcgagactccgtctcagagaaaaaaaaaaaaaaggaaaaacaaccctggcatttgtcagcatgcatgctgttgaaagctgtgggattagatgaggtgataaggtgcaattgtgtaggcagggcccaggacaaagctgcagtgttttaaggtctggagaagaaaatccagcaaaggggactgagggatggcaggagcgaggaggaagagaatcagtcagaaataatgtcactttgggaggcaaggcgggcagatcacctgaagtcaggagtttgagaccagcctcgccaacatgatgaaaccccatctctactaaaaatacaaaaattagccaggtgtggtggcaggtgcctataatcccagctactcgtgaggctgaggtgggagaatcacttgaacctgggaggcggaggttgcagcgagccaagtttgcaccattgcactccagcctgggcgacagagtgagactccatctcaaaaaaagagaggaaaaaaaaaggtcaaaagagcagcacttttcagaaggaaaacatggacaactgtgccatgctgatgagagatcaaacaagatgaagtcctaaatggttcactggaagcagcaacgtggaagcccctggtgactttgacatgagcagtttcactggagtgtggcagacagaatctgactgaggagctgggggtcagggcgggagggggtgctcagcaggcaagggtgtcacatttgttaatgaagacggtgtcacatttgttaatgaagatgttctctcctttgaatgagatgatgcatttagtgtgtaacagtgtccggctcacagtcgggccttgctaacactttgctttcactcacttccttatctttcattcactgaccagaaaggttaatggtggctgttcctcttttgaaaagcggattgggaacaccagcatagctattttgacactgggatttctgttagaaaagtagatgtgacttattccctttgggtggaactccttttctagaaagggaggcaacacacatgttgggtaaatctcagtttctagagtcaggctgccataagttaaatctcagttccgcccccgagacatgtagctatggggattttacatgaactcccgagtctcagttttctcaccatcaaccattcatcagaatagtgcctacctcaccaatgcacaccttaagcacctggcgcctctgttagctaccatttaagttgagaatttccctgtgaggttttttcagaggaggttccttctacaataaaccaccaagtacttggtccccttttgcagaaatccatccacaccatgtgtaaacacaggggctgggaacttgcatggtaaaccaggtcagccaaacacggattaacaatgccaggcccatttcacctgcaaagtatcagcgactcttcaatcggcaggtccccagctgccttgcagcacagccagggcctagcatagcgctgcctccttccctttcacttgtcctcaggaatccccggagatccagggtgaggctcctttagtctaatgagaaggaggcattctgactttttaggttattttctcttcccagcccctggcagatggaaaaagaaaacaaaacaaaacaaaacaaaaaaacaaacaaaaaaaaccccgccacaataattgctgcttgcatgaatgacctcaatacgggaagagtgctgagcgcctaagtccttgcactgctgccaggcctggcgtcatcatgattaacacagcaatcaccggccagggagccgggccgctctgcctaccagacaccctgactgggtgacttacggctttatatttttaaattggcctctctagcaccgtctgataaatcaacacacaagtcattaaatggttcattatcccagtaatatgattcattctttgtgccaagaaatgcaggagatgtcaggaaacttaaaaatatctcatttgaagccatgagtgcccatctacataacagattaactggatgagagagagtggttggacatggaggtcaaagagaagactcagcaggtggtggtcttacctgcagcagtcctttacctcctgctgaaaaatgtaagtcacactctcactaggcaggctctgtgctggccacactttctccctcataggctcagaaggcggtcatgctggctgcaggcacctgctagagaattcacagccgagggcactcagctagggtcattcctataggaagaacaccaagtccagaagatgacggggccatgtgctatggaagaaagagcactcggtcccagttctgccaccaggtctgaaactctgggtacattgcttgaaatgaaatcacaatactttgttgtcatcatctgtcaaacaagaaagtcattctccacattttttcaagttctttctagctctaagattctatgactctagtgtgttggaggagaagagaggaaggcagagttgagagcttggtcagagctgagttccaatgtatctgatatgtggattatgtaggagactcttccaccaaatctacatacactattttgcatgaaggttgctaatttatgttgattgtgtcagtgatggctcctttagtagaaagaagaaaaaaaatctaaatgaaactggcttaagcactaaggacatttatttgtttgtgtattctgcaacctctgaatgtttgctttggtctccattacaacacctgggactagaagagtccctagactcatggaacttaattctagttggggaaatagataataaacaaaacatatgtaactatattatctaatgtcaggtaatgacaaatgcaatgaagacaaacaaacaggacaggtgaatagagagatccttttttacacagaatggtgatggaaggtctctttaaggcaattaatagctgatacaatgttggtaaataaaggtatgacaagaagactatgagaccttcagagaagattcctgccaggaagcacgactaccaagagcacagatatgtggttaagcataccaggcgaacccagtgaactagatttctgtggaggatggaaggaaccagcatggtccaccctgttggggagctcagaatggagctgacagtgttggctgagaagtttggaagggttcctatgacagggccacatgttgctgtaaccaagagctcagcatctgccaaggactcaagtgaatcttcaggcagatttctacagcccccacttgctcagctccctcttctccagtggcctccctcacaaactccaacagtccacaaccctgatctctaaatactcggcttagtgagatcaatgcttttgttgagtttctacctctctgcatttcagaaaaaaaccccaaaaaaacaaacaaaaaaaacggcccaagaaagaaagctgggaccccctttttagaggcacgtgaaccagaacaactccatcttgaataggagctgggtaaaataaggctgaaacctactgggcttcattcccagatggttacggcattctaagtcacaggatgagataagaggtcggcacaagatacaggtaataaagaccttgctgataaaacaggtttcagtaaggaagccggctaaatcctcccaaaaccaagatggccacaagagtgactctggccatcctcactgctacactcccaccagcaacatgacagtttacaaataccatggcaacgttgggaagttaccttatatggtctaaaaaggggatgcaggaataatccaccccttctttagcatatcatcaagaaataaccataaacatgggcaaccagcagccctcagggctgctctgtctatggagtagccattcttttattgctttactttcttaataaacttgctttcactttgcactgcagactcaacctaaattctttcttgcgtgagatccaagaaccctctcttggggtctggattgggacccgtttcctgtaacatatttctccgtcctgcaacatatttctggccaccatgaacgtatgatactgagaaaacccccccgacttggaggaaatggactgcggcactgattggatgacttcgggtaagtgggtggggcacccaagtaaagaatgggattgggttagaggcccaacttaggggagttagtctctcctaagacagagtgggttagaagcccctcttaataaaaggcagaatgcttgacggaccttgggttagaggcccaacttaggagggttagagtcccttctaagatgtatggggttagaggcccctctcagtaaagtccctcttggctaaaaccaggtttggcaccgcaggttatgctctttgtattaatctgcctcgtactgtttgctgacggctgtgtgtgggtgacagggttaggcatgtacaggattgtgggacatggggagctttttcctccctaaaaggggaaacttgagcactaataggattgctggaaaagatccattggctactgacaagcagccgcctgaacttttcagtgtcgctgcaatgggtgggtctttctctggcctccccaagcatttctcgccttccccaccctgccccaggcaatgcttttctctctctcctttccctttcccatctgttctgttactcagggtgaccatcttgcccagagaccacgtgttgaaactccaatttggaggctggattaaaggtgacggggtccacccatctgggggcaaatttaagccctgccagtttgacattgcatgctaagcagagtggctaatgtctatgttttatcacatgtattttgctctggccagaacgaaaacaataattttcctttatgatgcagcttggcccccagggcgatggtgccgcaagctggattactaggggcgctcagggaaagggaatccagaagcctggcacgccagcaaaagggcaagaatttcttaccagtcagatttctggcttctctctgtgcaaacagttgatgtatggaaaaaaaacaaaatcagtatttatctcctctgtaaagttttgattaatgcgaaaaagaattctaaggctagtcttaacctagtgtgtttggtgctatgaatttgtttttctgtgtcaaggggtacttcaggataaaacacaggcttagaacacctgtcagtccgcttttcaagatgacccagcagctggtcataacaaacttggctgcaggtccctgaaacaaacaaacagacaaaaaaactggatgaagtctccaccttgttttatgtccttgggagcttgacgttttaatcacgtggtgataccttttcttggtctcttccttgtcccttccagggacaggaattttagggttcatgtaatagctctaaaaaatcatactgaataaaatcatattaaataaaagtctttgcaaactcaaaattaactactctagactccttctgggaaagaaaatggagactgccccttgctgtagctcagtagctagggttttgcactttcgcagtggtggtccgggttcaatttttcatgtaggaagttatttctggtttagtatctgtgtgaccttgtctattctcttgtgcttcgcagactgtcttaaattttcctttctctaaggacatgggaggttacctgtggtaaagttcaaaagctagaaatatcagctatttggcattagaaattttaaaaggacattattaaagagtgctacggttaaaatcaatttaattaaaagcagatagattcctctcaaaatcaaaggctattttgttttgcattgttatcgacagttttgagttttgggggtatcagaaattactttacattatgagagagctttggtgtgtaataactatgtaggaaatatactttaagggatggctaatagtagttatggaaggatacttgactctttgcacacttggatcagagaagcatgctcttggccacctgaaagatgattaaacatccccaccccacactgggggacgagactcccataagggatagtctaattacaaaataggctgattggctttgggttgccttgcaatgaaatgcaggagagaagcactgcattgtcttctcccgaaatatttccctccttttggggatccaggaaccggtataaaatgacactcttaatttgggggatctgtctttgccttcagctgcttatttggccctagaaatgcatgctttcctggccctgttcctccaagggctccaccctgaagccagtaatccagttaagaaaggtggttcacacctgtaatcctagtactttgggaggcccaggcaggttgatcacgaggtcaggagttcgagatcagactggccaatatgcttaaacctgtctctactaaaaatacaaaatttagccgggcatggtggtgggtgtctgtaatcccagctactcaggaggctgaggcaggagaatcacttgaacctgggaggcggaggttgcagtgtgatgagattgccccattgcaccacagcctgggcaatagcgtgagactccatctcaaaaaaagaaggaaggaaggaaggaaggaaggaaggaaggaaggaaggaaagaaggaaggatggaagggagaaaatggcaaatgaaaaatcttacaagtgctgaatcttctgtctgtggatttatatatgttgcatgtttatagataaaagagctctaattaactggcttagaaaaataggcacttaaatattttgtcagaaaaacaggaactttaatgcctttttgttcatgtgactttagtaatcttttggaaataatgacagttctaaaaattattagtaaaataaaatgtctttaaaaatgtagacatttggtctaaattaacgtcaaatatcagatttgctaaatgctttaaggtcaaattgtttttctgacttttgaaaattgttcaatttggctgggcccagtggctcacgcctgtaatcccagcactttgggaggctgaggcaggtggatcatctgaggtcaggagttcgagaccagcctgaccaacatggtgaaaccctgtctctactaagaatacaaaaattagctgggcctggtggcaggtgcctgtaatctcagctacttgggaggctgaggcaggagaatcgcttgaacccgggaggtggaggttgtggtgagtggagattgcaccattgcatttcagcctgggtgacagagcaaggttccaactcaaaaaaaatataaataaataaataaaagaaaaaagaaaaatgttcaatttacctactttaaagtcattagcttctagataagggctgggacatgtggaattagccatactccctagctatacaaacaagattataaagaaagagattttacataagaagggatctcacatggtaaattcttgtcctaaagtaaaataactggttgtttaaaaggagggatgtttaaggcaagtcagaaagtccaagaatgactcagatggtctgtgtaagtcgtgaaaggaactgtgaaagggaatttatgcaagaaatgtacaatccaaaggttcttaggcctcctaaatccttcataaaatgccactatgactcttacttaagtaagagtaaggcctggggacatttggaattagccacactccctagctgtgctagagagtcagctcttatctgcacttttgcctggtgtgtcctaggcaggctacacactagtacacaattaaaatctcgaatttaccaaggttttcaccaaaaataaaagttgctaagagttaacattataacatgtaattaagactactgaagaaacagttttacatgcaaggtgtgtaagaaaagcaaaatgtgtttttggttaaaaaaaaaaaaagattataagaagtcatgggaatgtggttttttttctgcctaaaatgttaaaggattgttttaagtaagaaaaaaaaatttttttaaactagttgtggaaggtttataaaaattaattgtaagagattctgtgtttgaacatattggctaaagttaaaggaatattattcactaaacattggaataaaagcacaatgggtttttctgctctttcacaaaaaatgtaaagagttataaaaggtttataagaatctttccttatggttaaacattaaaattgggtaaatatgtctataaggttttatataaaaattggatttaacattaatagtacattaaaataaaggtaaaatttggcttaattgatgtaaaattcatacaggaagcattatcaaatgtaaaatggtgtttttctttctttagatatttgcataaatgtgttattggcatatgttccaaagttatggaaaacttctataattctaatataacttagtgtatgttattaataattataattgttatgtaaaattctgtgtaccacataggtaaccaaatttcctgatcaattatggctttaatggtggctgtcctcaaactttttatcatccacaggcaattgctgtcttgttttaatcccctttaaaagatggtttgtaatcaactataaaaccctggcaggtgttaaatacaagtttttctaataactttggaaattgtaatattaaaataaagaaaacaacattcaaaactctcataaaaagctaaaatgtttacaaatatcaaatacaacagaaattaacagaaccaataggaaactgaagtaatcttttcaactttgcttaaaacactgctaatcctttgttttgtttttcagagtcaaaaaaaaaacttttttaagctatttacagcttataacaattgagtaaagtatactgctgtgaaaaaaaaatggaaacatatttttctctacctaatttttccaaaatttaggaactagttgtaagtatgcttaacttatggcaatataattatttgtataagtgcaataaaaatctgttttcttttgtaacaagacacaattgaagaaactggtcattttaccaaggctttaactggaatggtgtgttttcccttaagaaattaaacttaacttgtagagccaataaaagcctcatgggaaactggcctcataccttgcctacaacagtgcctgtacagggtttctgacctgtggtaagtaaagaatgccactttctaacaggtccagaagccacaagttatcttgggacctcaagaggaaagaaatttaccaaactcataggtatttgatggtacaaacccatggataagcttggccttaaaagccttatctaaaattccttctatggaacagaattccatcaaagccaatttaaaaagaacctatgtgaaaaataattattcttgctgcactttatacaaataatcaggccaagtataataaagcaaattggtcttaccataatttgcatttagcaaaaatgggaaactggagagagaaatattttgtttcaaaaactatggtatacttgttattaaattctagtctcatcagtcattttgaagtttgtttctgcaataagcaggctaactcttcttcttccggtgaaccaaccagtgatgtctgactgttgctcagaagaaacaagagggatgggcaatgtaaaaatctggattagtattctaattctgggcacattacaatcagctagcaaccccataccagcttagttccaacagttgcccaattcatgaaaagccttctaatttagtttacttggaataactttacttattttgcttcactcttgtggaatatattgctgttatactctgtgtaggaatataaaaaaagcttactaaatgttttcttaaacacttattaatcttccagatatcacctcttgtcaaaactcaagagtcataaatggccctcaccatactgatgttttctaactgagctcctctctaccctgaacacaatagaccctaacaggcagaaatatcatcacccctattcagcctgaagaagttacagaaaatgaatcttcatacctctgcgacccttaggattaagggttctcttataaaagggaagggggaaatgtcagaggtttgtgaaccagaacaactccatcttgaataggagctgggtaaaatgagactgaaacctactgggctgcattcccagatggttaaggcattctaagtcacaggatgagacaggaggtcggcacaaagtacaggtcataaagaccttgcctataaaacagattgcagtaaagaagacggctaaatcctaccaaaaccaagatggccacaagagtgacctctggtcgtcctcactactacactcccatcagcgctaagacagcttacaaatgccatggcaacatcaggaagttaccctatgtggtctaaaaagggaaggcatgaataatccaccccttatttagcataccatcaagaaataaccataaaaatgggcagctagcagccctcagggctgctctgtctatgtactcgtaacccattcttttattccttcactttcttaataaacctgctttcactctgcactgcggacttgccctaaattctttcttgtgcgagatccaagaaccctctcttggggtctggattgggagtcctttcctgtatatctctgttctgtaacaccttgaggctcattttgtgtgtttcctttctctcaacaatcacagttctgcactgtgtaatgttcagtgtctgaaaacacctgcttcatgtttgtctaatttaatagtagttttctgtgggaatgaaagtctagtactagttacactgtcatggccaaaactgagggccttttgggtgtcttctaatacccttgattcttattggcagctgcctactctgagtaaatgcccaacaaaatacgaaacagctcagcttcatgtcttccaaccaacctcagaaaaaagataaagtctgatttaaatttcatatcaaaagcaatatttcaactatttaaagctacaataaatatacaaccatacggaaatctgtaaccaaatataaaaccctctaaactaaaacatttaacacagcagagaccaccaatgtaacactgggttaattcatttttgtgtaaaacctgtaataaagtgtaccaccacatttatgtttaatttaagagcctctttactccagaagtataaggggcccaaatcagaaaacctattgatataatttaccacattaacaaaccaggaaattatatggttatttcaataggaaaagaaacagtattcaataaaattcaatctatacacataataaaacatatattacaataagaaaagtaaaaatgaaaagcttaatgaaagatatttaatttaaaagccacagaaaacatcatatgtaacagtgaaatttaaaaatcattctcattaaagtcatgctcaacactaaggtgtcaagtgtctctgcttgtattcaacatgtcattcaccattttttttttccctgtggtatctcttgacctggtctcaaggcagccagaactccagaaacacaataagcattgataaaaagatctcgaagagaagccctctagttcaggctcaagaagaggaaaaggggtctcctgttaatacaagttgtggcagccagaacccacagcgctgggaactcaaagaaagaagagccttcctcttcagtgaaaagagctactgtccaaagggggtgaggcaagttcctgttgatttttcctctctgccccctactctctccagatacacactggttggccttggatatagacatagttccagaaagaaagtgcaaaagcaaagtaaataaaacttcaggtttttggctagaggactaaaaaaggagaatcccagtaccaagactgcagaaaaggaggagcttgggaaacaataccattaaggtgtttatgaactcctgaaatcaacctcaagtttagcattcaggttctgattcaaagcagcctacaaagacattgagaactaaactaagagaccatgacccatgtcccagattgaccaccagagggtacacatgtaggacaaatttaaataggactgcaaaggctgttaaaagtaaactaatatagagactttatcccagagaaggccactcagaatttacaatctaagcccaatcaggtcaattggctgctaaaacaaaaatgtcaatattctccacagggtatatacaagacccagtcctgtagtacacaatattgaaaatgtccagaatataataccaaattacatggcacatgaagaaccaatgaaattacaaattgcatgagaaaagacaaccaacggatgacaacagtcagatattggaactcatccaacagtaaacctttccaactgatgctaaatttgtctgacaaaggctttgataattatcccactagtaagggtaaacgtatttatttttatttttaattttttgagacagagtctggctctgttgcctaggctggagtggagtgcatgatctctgctcacagcaacctctgtcttctgggctcaagccatcctctcacttcagcctcatgagtagctgggactgtagacagataccaccatgcccagctaactttggttctatgtatgtatgtatgtatgtatgtatgtatgtatgtatgtatgtatgtatctatctatctatctatctatctagtagaaatggggtttcaccacattgcctgggttggtcttaaactcctggctcaggcaatccacttgcctaggcctcccaaagtgcacggaataaaggcatgagccacagcacctggcctaagcatctttaaaataaatcaggtaatagaaagtctcagcccaaaatagagccaaacatacataaatgtatatacaatacacaaaagaaccaaatataaaatccagaactaaaacatacaatgaataaaatgttaaaactcattaggtgtactcaatagcataattgagatgacagagtgaaaagttcactggaacttgaggatagatcaatagaaatattcaaccttaaaaactaagaaaagattgattaaaaattaatctgggctgggtgcgatggctcatgcctataatccagcactttggcaggctgaggcaggaggatcacctgagttcaggagttcgagaccagcctggccaacatggtgaaacactgtctctactaaaaatacaaaaattagctgggtgtggtggtgggcacctgtaatcccagctactcaggaggctgaggaatgagaatcgcttgaacctggaaggcagaggttgcagtgagctgagattgtgccactgcattccagcctggacaacagagcaagactctgtctcaaaacaaaacaaaacaaattaatctgtgggataaaatagaaatgcctagcatttgtttcatctgagtcgtagaaagaaataataaagactgcagtggagacataatatttaaagaaataatgtatagaaactcttcaagtttgggggaaaaaataaacctacagattcaagaagctcagaaaattgcaaacagcgaaaacacaaataaatcaatgcaaagacatattacaatcaaactttgaaaataaagacaaagaaaaaatcttaaaagcagccagacaaaaaaagatgcattgcttaaaaaaggaaaacagtacacaagacagtggatttctcatcaaaaatttctgataccaaaataataataataaaaaaatttcaaccaagaattctaggtccaagaaaaatactcttcagaaatgtacatcaaaaccacaataagataccacttcacatctactaggatggctataataaaaaagagacaataacaaatgtttgcgagcaggtgaagaaattgaaacccttacacattgctcataggaatataaaatgatgcagctgctttggaaaacagtttggcagctcctaaaaaaattaaatatagagttccatatgccccaacaattctacttctaggtatagacccaagataattgaaaacacatatttacacaaaaacttatacatgaatattcatagcagcactattcataatagccaaaagatacaaacactccaactatcaatcaattgatgagtagataaatataatatgttatatccatacaatgaaatgctattctgctgtaaaaaatacttaagttctgatacatgctaatatggataaaactcaaagaaattgtgcaaagtgaaagaagccagaaagaaaccgccacatattctatgatttcagttgtaggcaatgtccagaatagacagattcatagagacagaaagattattgatggctaggggctaggtagaaaagaagaatgaactgctaatgtatacagggattttacgggtggtggtggtgatataaaggttctagctttaggtaatggtgatagttgcacaactttgagaatatgcaaaaaaaaaaaaataaaaaacaaattgtgtactttaaaaaggtacattttatggtatgtgaagtatgtttccaaaaaaaaggagaataaagaagttctcatttaaagtaaaaccaagagaattcattgtcagtggacctgctctaagagaattgctaaagtagtcactagacacaaaggaaatggtaccagaaagaaacttcagagcagaaattttaaaaaagcaaaagaaatttaaaatatacgaaaaaattgagtaaactattcttctgttgaattctttaaaatatgttatgtttcaaagtaaaacaatatttttaaatgaaatttcaaagtatgtagatgcaatacgtaataaacatataggccgggcgcggtggctcacgcctgtaatcccagcactttgggaggccgaggtgggcggatcatgaggtcaggagatcgagaccatcctggctaacacggtgaaaccccatctctactgaaaatacaaaaaattagccgggcgtggtggtgggcacctgtagtcccagctactcgggaggctgaggcaggagaatggcgtgaacccgggaggtggagcttgcagcgagccgagatggcaccgctgcactccagcctgggtgacagagtgagactccgtttcaaaaaaaaaaaaaaaaatcatataagaaattacaacataaagggggaagaaggaacctatagagaggtaagatttcaaaacacatgatacagtaaaatactgattctgtgtagatagtgaacatttaaatgaaaatattgtaattactagggctaccactttttttaatttaaaaaaagtacgtacacaatgagatgtattcaaaaacacaagatatagaattgaattaaaaattattaaataagccgggcacagtggctcgcacctgtaatcccagcactttggaaggcagaggcgggctgaggtcaagaactcaagaccagcctggccaacatggtgaaaccccgtctctactaaaaatacaaaaattagctgggcgtgttggcgcccacctgtagtgccagctactcaggaagctgaggcaggagaatcgcttgagccagggagacggaggttgcagtgagccaagattgcaccactgcactccagcctggccgacagagcaagactctgtctaaaaaaaaaaaaaaaaattattaaataacccaaaagaaggcaggaatgggaacacacagggatgataaacagaggaacaaggagatacaaagaataaaatgatagaactacattcaaacacatcaacaattacattacaggtaaatgatctaaatgcaccaaataaagagattgtcagaacaagtttttaaaaatacataatccaattatatactctctataaaaattctgcttcaagcataaagatatcagtacattaaaattaggagaaaagatacaaaatgcaaacactaaccaaaagaaagctcaagtggttatattaatatcagacaaagtagacttcagagcaaacaaatttagcaggatatcatacaataataaaagagttcatttataagaattacataaaaaccctaaatgtatatggaagctaaaaacaaaccttcaaaatataaaaactgaaaattaatttttggacaaattggactacatcaaaattaaaaactttaactctgaaacaacactgctaagagagtaaaaagaaaggctacagattgggagaaaatatgcgcaaatcacatatccaacataagacttgcattcagaatctaaaaggaaattttttaattcaacaataagtaagcaaacaaccaaattaaaaaatgggcaaaagaggtgaacagacactttaccaaacagtatttaaggagagcaaatgagcacatgaaaagatatttaacatcgttagtcattatgaaaatgcaaattaaaaccttgttgaaatgcaattacacacataaataaaaataacgacaatgtcaagtgagagtgaccatgcagaacagttggaactgcaaacattgctgtgggaatgcaaaatggttcagccactctgggaaacagcaagtttcttataaagtgaaacacacacttaccatatgacagaacgtcaattctactcctgagtacttagagaaatataaatttatgttcattctaaaactggtacaggaatgttgatagaggctctgtttataattgcccactggaaacaacccagatgttcttcaagggatgaatggttacataaatgagccaaagatggcctctgtgttttggcccctatgtttattgtaggttgagaccagttagctcaaaatcctgcccaaaccaaactcaaatttgtacataccgagttatttataaaattgcctgaacaagcaaatttttagctatttagagctttcctgctttgcatactccaagaaacctcacccaacagctgttacctactgataaatagggccttgcagttataaaacccaaaattcctgctgcctttggtttgcctgacccaagacttcctgctgtgctgctgtgagacacccttgagatacatacataagccccatattcaaccctccctccagagttctcttgccttattccctttctcattggtggtctcattagactgtctcatgcaaccctgtcttactgccactcaataaagttgtgtgttactgcctctcattgtcatatgtttttcctagctcagtccccaaatccctaaaacccttaggtgaatacataagcaaactttagtacatccacacaatgaaacactacttagcactaaaaagcaacaaactattgatacacgtagcaatctgaatgctcagtaaatgaggccagaatcaaagttgatactacagatttcatttatataacagtttccaaaagactacagtgatagaaaacagataactgattgtcagggattcggaatggaggtgagtgtgacttacaatggaacagaatcaggaaagttttggggatgatagaactattctgaattctgactatggtggtgtttacacatgtgttaatatgcatgtatctgtataccaatataccaaaagggccaatcatgcatattaacaacatacatatgttaatataacagttaatataacagtatatatataacagtattactataacagttaatataacagtaacaacatacgtgtgttaatatgcatgcatctgtataccaataccaaaagggccaattctactgtatgctaattttgttttgttttttttttgagatagagtctctctctgtcgcccaggctgggaatttataaaattgactgattaaaccagaaagaataacattgtattatatcatttattatgtggatagataacaaaatatatacaatgatagcataaaggactgtaagaggagagtagttttactgttagaagtttcttgcattgtataagtagtggcacagtatgtactctaagtagactatggtaagtatatgtgtatataaatacttagaaaaatctctaaaatatacaatgaagttaagctaaatatcagtggataaattaaaatgaaacactaaaaatatctgattaatccatgtgacggcaagaaaggaagaacaaaggaaaaaaatagttgggatgactaaaaaaacaaatagcaatatgatagatatacttaaacccagccataccaataattacattaaatgtaaatgtactaaacattcctattaagatgcagtaatagtcacactagatattaaaagcaatatccaaccatatgctacctataagaggcatactttatatataaaactgcagattgtttgagagtactaagatgcaaataaatattccacacaaagagcaagcctaagaaaaacaactatttgtttgaataacattattagccaattttactgggttaacaataaacattgcatccatacactataaatatgtaacttgtttatgtgcacatgaaacatatattttagatacaatatgctgggacacaaaataagtctcaatgtttttaaaggattgagatcttacatagtaggttctctgaccacaacagaattaaattagaaatcaataaaaataacatgcctggaattatgcaaaatatttagaaattaaacaactactacctaatgcataggtcaaaaaaaaaatctcaaaggaaattgtcaagaaccatgaagggtctgagttcgtattctgtttgcaagctaacaagtttgcctgccacaatttcacagatggtggcagaggacacaaaactcctgagtcagaggtaaagaaattaattgtccatagcacagcaagcagcatgagtttcgtatttacccaagtccctcttacccctccagtcccagtgagagatgtggagctgcccagataaatgctatacacacagtagttttgtatcacatttaaagaaccctaagctaggaaattcagtaggcaaatctgtccaacattttctccagagggagatattatctttattacgttaggcagcaaacaagtcttctctctactccagagaagtgctgtctctattttctaatgatatttgttattcaacctccttgaaatgtagcctaaaactaaagttgccagtgccaatatgtgtaagacaaagaagaattctgtctaaatggaaataataaaatattttgaactgaatgctaaaaaattaggcatataaaaatctgtgagatgcaggtaaagcagttttttgaggaaaatgtatagctttaaatgtttaaaagcaaagtagacttaaaaacaattatctaagcttccactttaaaaagctagagaaagaaaagcaaagtatgcccaaaataagtagaacacttttttaatattttacctgaagtgatatacatttagaaaaaaatagtacgttgaaggacgaaaataataaaaatatggcaaaaatcaataaatagaaaacaagcagtaaagtcaataaaactaagagctggatcttttcaaagatgaataaaattgataaacccaagtgaaacaaataaagaaaaagagagagaaaacacaaataccaacattgtcagtgaaagaaggggatatcattaacacaacttaccaaaactaaaacaaaagagataaaaaatctaatagcccaatatctattaaagaagcagaatacattatcaaaataacttatcataaagaaaactccaggctcacattgttttattaatgaaatctatcaagcatttaaagaagaaatagtgctaatcttacccaaacactttgaaaaatagtaaaggagggaatatgttatatggaccagcataagttttgacataaaacttgacaaggtaattacaaaacaaaacaaaacaaaacaaaacaaaacaaaacaaaacaacaaaaactacagaccaatggtctctcatgactatagttaaaaaagtcttttttttcttttaaacaacaaagaagcctatttattgagggggaaaaaagagacagataggttatagatgttgttatacattatatcttataatttacattttgctttcataggtcacagaaagatgtataaaaacaccaaaagcaatggcaacaaaagccaaaattgacaaatgggatctaattaaactaaagagcttctgcacagcaaaagaaactaccatcagagtgaacaggcaacttacagaatgggagaacatttttgcaatctactcatctgacaaagggctaatatccagaatctacaatgaactcaaacaaatttacaagaaaaaaacaaacaaccccatcaaaaagtgggcgaaggatatgaacagacacttctcaaaagaagacatttatgcagccaaaaaacacaagaacaaatgctcatcatcactggccatcagagaaatgcaaatcaaaaccacaatgagataccaccatctcacaccagttagaatggcgatcattaaaaagtcaggaaacaacaggtgctggagaggatgtggagaaataggaacacttttacactgttggtgggactgtaaactagttcagccattgtggaagtcagtgtggcgattcctcagggatctagaactagaaataccatttgacccagccatcccattactgggtatatacccaaaggattataaatcatgctgctataaagacacatgcacacgtatgtttatacaggcactattcacaatagcaaagacttggaaccaacttaaatgtccaacaacgatagactggattaagaaaatgtggcacatatacaccatggaatactatgcagccataaaaatgatgagttcatgtcctttgtagggacatggatgaaactggaaatcgtcattctcaggaaactatcgcaaggacaaaaaaccaaacgccgtgtgttctcactcataggtgggaattgaacaatgagaacacatggacacaagaaggggaacatcacacactggggactgttgtggggtggggggaggggggagggatagcattaggagatatacctaatgctaaatgaccagttaatgggtgcagtacaccaacatggcacatgtatacatatgtaacaaacctgcacgttgtgcacatgtaccctaaaacttaaagtataataataataataacaaaaagagtaatctatagagcaatgaacattacagattgtgtgctgaatcaggaaagagtttgctttggactatagttaaaaaagtcttaagcaaaatattagaaaataaaatctagtgatattttaaaaagtataatgaccaactatgattactccagaaatacaagattggtttaacatttaaaaatcaaccaatgtcaaaattcaacacatttttaaaaagctttcagaaaactgggactagaatgcaactttcttaaccttataaagagtatctgagaaaaacctacagctaagtcatttttaaaggtgaaacattaaatactgcccctttaagaataaaaaagtcaagatatccactctcattattcttattcaacattgtcttgaaaatcctatctacttcagtaaggcaaataaataaaacaaaaatgcataaaaattgaaaagaacaaagtaaaactgtttttattcatagacttgattgtttccatagaaaatttaaataatctacacaaatatttagcatgatcacatgatacaaggtcgatataaaaaatgtatttctgtgtactagcagcaaacaattaaacatttcatttataaaatttataaaatgaacacttcatttataaaaatttcatttataataacatcataaaatataaatatatgagagtaaatttaacaaaagacatgcaagaccactgaaaacggaaaacattgatgagagaaagtaagaaaaatttaaagagatatgaaatagtcattgattagaagactcaatattttattttttttatttttttgagatggagtcttgctctgttgctcaggttggagtgcagtggcatgatctccactcactgcaacctccgcctcccaggttcaagcaattctcctgcctcagcctctggagtagctaggattacaggtgcgcaccaccatgctgggctaatttttctatttttagtagagatggtgtttcaccatgttggccagattggtctcaaactcccgacctcaggtgatccgtctgcatcggcctcccaaagtgctgggattacaggcttgagccaccacgcccagccagaagactcaatattatgaatatgtcagtttcctataaattgatctatatagttcatacaatacaaatcagaatttcaataagaactttaatagaaattacaagttaggcctaaaatttatatcgaaataaaaataaccgacaatcatcagaacaacttttaatgaggaggaaaaaattggagaagtctcactaactgatttcaacatttaccataaaacatatagtaaataagacaatgtgatactggcataagaatagacaaatagataacagaaaagaggagggaatccagaaggagttctacacatgtttgattcattcggttttcaacaagctgccaaggtaattcaataggcagggagttgatggcagccctccttggagaccaccgaccacagctcttctgcagtgagcagagtgggagacaccctggtcttggaggccagtgcacaagcccctggggctgcttccacttgagaagaggagaccagttctaggccttagggagaaaagctctctctgccttgcctacttctctgccttgcttttctctgaaacagtatgtctccatctttgagtggttactgggcctgagtccataaagagggaaaagacaggctcaggctacatttggtaatagaagccctcccagcagtcctgcctcgatcaccagaggatgactttcgggttggggcctaatgctactacagaactcacatttggtgtatcttccaagctcccaagaacccaaagcttccaagaacacaaagcaggggctgtgctggagcagggttctagcattaggaggtcctaggtctcagctagatgctactaggacctcaacatatctgggcttctgaaaatggatgtgtttgcagggaccgtttctgttctgcaaggtggtttgatggggtgagatggaatatggctgcactgcgttggcaggggaaagcaaagggaagcctggctttcctcctcctgacccagagcaaaggctaggggctgggccacctcaaacactgtgtgcatagcagcctccctggatctcagctaggggtattctgcaccccccaggggactctggcaatgtgcacagatcgttctaattgttacaaccgggagaatgctactgcatctagtggataggggccagggacactgcttaacatcctctagtacacagcatggttcctcacaacaaagaattgttcagttcaaaatgccagtagtgctgaggtggaaatgtgccctgaataaccttcaatttccccttttggaaaatgtgatacatgtatgcgacagaatactagtcagacataaaaaagaatgaaataatatcttttgcagctacttggatggaaatgggggttattatcctgagtaactcaggaatacaaaaccaaaccaaatcctgcatgtcctcacttataagcgggagctaagctatgggtacacaaaggcagatgggtatgatggacatgggagactcagaagggggagggtgggagaggtcagagataaaaactacctatggggtatgctacattatttgggtgacagtgcactaaaagaacacactttactgctatacaatttatccatgtaaccataaaacacctgtacccctaaaagctattgaaataaaatttaaaaaagaaaaatgttttaaaaattccccttttgcccttacatagctacagggaagctacttagaagcggaggaaaggaccctacattagaagtgtgtttacacgtttagctaaatgaccaggaaggctcatgaaggcagcctgattactacttcatctcaatgcaaggctcttttgcttgtttccattttactattccctcggtctttgaacgttgtttctgctctcccatgacaggcagcacacgattgcagtaggttttcatctttgtttattaccatttcccctacaccctcaccgatttccctcccctattaaaagatctggttctctatgagaagcacaagccaggctagggctgcattaataattgattttctacttctctctcagcaagctatggtgtttgactttgaggagtggctttttataaagccacagtgtccttccagcacaattttgagttgcaatgatctttggtaggtgatttcttttttctcttattgtttagctattagcagagtaataatgatcataacattttcatcctttcagatctcgtacaggggatgacacctgtgaaagggccttgagcttctctgatgacatctttgtaatttttttgagctccaccacagcagctccagctgctcattaacccgccactggtaatgaggtttcactgatgcctctggggagtctgatttgtcagggggcagcaaactgtggcctggacgacatgagctacgccccgtccttcccctgatgtgacaatgctgacattttcatggctgagatggcttgcggctctctccccaagcctgcactggattcttgtcactcacctgcatcattccaaaccatgccccatgcccagcactgattaaacacattaggctacattcattcctgagaataccatacagacattagatatgacaaagcatatctacactagtaaggcagtaaaataaccaaggtctatgaagtgcaacagaaaattgcctaacaacatgcacagatgatctcactgaaccatattacctaccattcatatattaccacaggcacagagagcacctggagaaacacagtagcaactgctcacagtgactaccccggggttgggaaggaaggggggaaagttacaaggaactttcctcttctgggttttgtggggtttttttgttttttgctttttttttttttttttgagatggaggttttctttgagatggtgcaacctcggctcactgcaacctctgcttcctgggttcaagtgattcttctccctcagcctcccaagtagctgggattacaggcgcccaccaccatgcccagctaattttctgtatttttagtacagacggcgttttaccatgttggccaggctggtcttgaactcctgacctcagttgatccacccgcgtgagcctcccaaagtgctgggatgacaggcgggaaccactgcacccggccttctactgggttttgtaatgagcatgtttgtggtggaaatgtgtcaactgcctgtccagagacagttgtggtggctcacgcctgtaatcccagtaacttgggagggtgaggtgagagatcgtttgagctcaggagtttgagaccagcctgagcaatgtagtaagacactgtctctacagctaaaagaataaatgagtacataaataaagaaataagctgaattctgaggaggcttttactctccataagaccacctgaagtcaaccctagccctcaagctgttcagctacagcagccaatactttctgttccctgaatccactttggctgggatttctttcattggtggtcactggtttcactaggattccttatatcctgtttctttgttccaggctcagaacaaggagcacctcctcctggaagcttttccccaaggatcactcctaacgactatgcctatgcccctcaatttggccccacaagatgagcggcttcatgttagcctcagtttcattcacacagatatggtttgtctggaagaaaccaaatctttaaggataagaggtaataattagcataacagagaacatctattagaagcttcctaagggtcaagcaatgaactaaatgttttacatggataattttatttcatttttataacatccttaggaggtagatatcattagtttccttgtctgtaaataagatagtaagtccgagagatggtaaatggcacaattaccttttttatcgtgctgctcagcaatgaccattcctttcagaaggaccaccatgcccctcctctgtaagctgttgctggaactgactgccccacaagtttagaggcagagcttacaaccctagcctggccaatcaatgacccccttcccccagtgacatatgattggctcaggtggacatagaattgaagtcagtccattcagagtggatctcagaacattgctagaaaggctagatttgtgcccagaagtaaatgctgcaaaaaaaaaaaaaaatgctaatggccattttgcattttgcatgacaaatgtcaggaattggacagttctttaagaagcaaagtcatcaaatggagagagattccattctgtcataccatttgagccatggatcaagctatatcttaaaccacatctagccctaaactgttcagttgcctgagaccctctgataggcaccagcccccttggaggcctttcttttatttgaccttttgtggatggaagctgggatgggggtgggcaggagcccagtgactatgtaagcacaggactggctatagaaatggaatgaaatagccctaaaggattctttatgaagattatggaagagaagtatataaaagaattaggaagcagaacaacaaaaccgtaaacaaagatagaaatacagctgggcgcggtggctcacacctgtaatcccaacactttgggaggccgaggcgggcggatcatgaggtcaggagatcgagacaagcctggccaacatggtgaaaccccgtctctactaaaatacaaaaataaaataaaataaaatcaaaataagccaggcgtggtggcgccacctgtagtctcagctactcaggaggctgaggcaggggaatcacttgaacccgggaggtggaggctgcagtgagctgagatcgtgccactgcactccagcctggcaacagagcgagatcagtctaaaaaaaaaaaagatagaaaaacaatcctccccatggaccttaaacacaggccacatgctcatgcttcacacacatgactgtgtgcacacacatatcacacagttctcactctatccctcctccctcccttctcccctctctttgtttgaaagtacccaaaggccttctaaccatttccttcatttcacacgcagatgattttataatctcatctaaaaactgttgatatgaaacataacaacagaaatacaaacagtgaatcttgatgaggtgaaaacaaggtgagaacaataaaatagccaaactggagaagactttgattccagcacaaacccttgatgcagaagatcttacagccttcagttaaataacctgtgtggttctgaggacacagagtaccatgaggacgtggacaatgatctagccagtctgtgaagggctcagctgtcacccacccagagacgccattaagagacctgctttcaggcggctgcagggagctctggactgggctccagcctgtgccccaacaggctttagccacgcaaacttaaacacaccttagagcgtgtctacaaaggaaacctgaggtgactgttcatataattctctcctggaagatgaacacgctccaagcacactgacctgaatcacccccaggcccctttcacctcattaggccttgaaggaaactgcaatcctcagctgctcccacctcacagaagcctgttacagggactggtacaaaaacagagaagcggcttggtccggagagctcctctgcacagggctgataaagggaatccaggaggccacacatgacctttcccccaggtcctgcaacaagaatagtttttgaatctgatcgttgcagccaaagtcaggacacagcagaacagcatccctcccttcccactccctggctttgctatgagctacaatatcgcacctttccaaagaaaaggatattggtcatccaggggaagaaaaatggaaatctcaaggaaagtatttctccagaattatcatttcctctctatctagtaagcatcttctgtcctgcacgcacgtgtaccagcggccacgctcttctcctcaacacatattctcttggcttctgggccctgtgctcttccttccagctctctggtcaggctttctcagtccatccctggctcctcttcccctccctgaccctcacacctgctgtggtcagggcctcgttctgagccttcctctcacggcacacaccctcctccattgccctccaagtcatctccttctataaggcctctcttctaagcttattatgttcaaataagtggtctccctcagcactggcatgtcgtgggaaaaccactgggctggaactcaaaagacgtgcatgtgagcccagatcccctgatatacactgtgaaacccagagaaaactcacctgccctgtgatgatccaaactgtcttctgtaaactgatgccaggccacaggattgtgtgaggatagtgacatcacatggctgggtccttcgtaaaagaaaaaggccagccctgtgggggctactctttgcggtgccaggtagtgggccagcagcccctgatgagggaggtcagctgcggccctgtcctgggcaggggacattctgtgaaccaagtgttacaagttaccgtcactactgaaagactccccaccctcctcttccaaataattctgaaaacattttgaaacaaatgattttggaagataaaatatttatgcaaagaagatattttaaaacccctttcaggccaattttctaaaatatttctcacgggaaaaaatgccttttgagaaagtttcaggcaagatagagcttggacataggctgtctgtgctagaaggttcttcatagaaaccctgtgagctgcagaagtctcgatgttaaacaaataattttccagaaaaccccataacgttaaatgggttaatgtgagcactaaaggtatgccagggtccctggacccctcctgcttgcccacttcctcactcctttagttctgggaatccctggggaattcttggtttgggcaaatgaagtttgcaaacattgctctaacttactctctcctttgttgagttaagaaaggagagacgaccagccaggaactgtggctcacgcctgtaatcccagcactttgggaggccaaggtgggaggatcacgaggtcaggaccagcctgaccaatatgatgaaaccccatctctgctaaaaatacaaaaattagctgggtgtggtggcgtgtgcctgtagtcccagctacacgggaggctgaggcagaagaatcgcttgaacccaggaggcgaagtttgcagtgagcagggatcgtgccactgcactccagcctgggtgacagagtgagactctgtctcaaaaaaaaaaaaaaaaaaaaaaaagaaagaaaggagagacgagaaggaaggtgtgtccgtggccatatcgacagtggctcagaacagatcagctgcatcctgggccaccaagctcacatgctacctgctggggcagctgtaggacctctagcatgacagtcacctatggacttctggcaggagtgatgcccatctgtgaccccaaatgcttctcagtcctcaagggacagtgtttgtttaatggcacaggacactcatggatagagggcagaacccaagatttttgctcagaagcaacagaaagagaggctagagatttatatggaagatgaggaccaactaaaacaacaggaaccccaaagaaccagactcagaaaaaggccacagccttgtcagggtgccagagatgcagggaatgacctccaactccttcttctatcctctaatgacccctactcaaatgcaaagttcttgagtcataagttcgtctctatgcagagagaaaaccttgactgaccatcccaccaagaaggaaacctttaaatgtattatggagttgatgtatttttcttttcttttttttttttttttttttgagttggagtcttactctgtcacctaggctggagtgtggtggcatgatctcggctcactgcgacctgcaacctccacctcccaggttcaagtgacttgactgtctcagcctcctgagtggctgggactacaggtgtgcaccaccacgccccactaatttttatattttctagtagagatggggtgtcaccatgttggccaggctggtctcaaactcctgacctcaactgatctgcctgccttggcctcccaaagtgctggaattaagatgtgagccactgcacctggccattatttttcacacttacatattaaaaagtgcaatggggctaggaatggaggctcacaactgtattctctgcactttgggaggccaaggtgggaaggtcacttgagctcaggagttcgaatccaggctaagcaacaaaaggagaccacgtctctacaagaaaaaaaaaaaatcagctagatgtggtagcatgtgcctgcaatcccagttacttttgcctcctttatcagaatgtttcaggcaaacatgcacttggccatcggaaatattccaataattttctggtagttaactttcttaaatttcttaacagccaggaaacttctttactttattctaataattttcccgttgctacaacctgatagttaaggaagttcaaataccttctggaatctaggaatccatttttgcctcagtagatgtaatgactgcatgaaactgttggcgaatgacattctctgagtgtggactccacgtcaatgctgttccaggtgctttgcccatgttgactccatgaatccactcaacatgctggtttcttatcctcattttgcagatgagggaactgaggcacagagtgtaagtcacttgcccacagtcccagaggatgtaaatggcagaggcaggattcaagcctgacagtcttggctctggagccttcgtgcttagccactctttatccccaaatcgctgtcaaccaaggtgagcagcgaccaaaatttgacaagcctgaaaccactgcttgttgcccccgacctaggaccagctagaccacagttactgctgctctgaagacaacactgtcacttcacacctgctcagggcccttcttggcactgatgaataaacccagcctggggtccgagaaatgggcagtgcagctctgaagacacgcccgaagttctctgtcccgagggaggacctggagccgctgtcccagaagcgtgttcctgatggaaggcactcataggctctctgcaggggagacctgccagttctgtttttattgattttcactttgcaaaaaagcctcttaaatcaaatcaaactcactaggaaatgtgggaggttgcaggcgcactgccctttgtttgtctctagtgctttaaaggtgtgtcctttcttctaagtggctcaggaggccaaaagctgtcctgaaagcatacctcaacttcctgccttcacctctgtcaaccttaaggcaattcttgatgcatttgatgttgttgtttcctgccagccacaagtccatgaactcctaggactctaagacaaacagtgctgctgctgcatttctttccttggctgtctgccctctctgctgcagtctaacctgagggggaaagggatttgtggttccaaagacagggtccaactgaaggaaaaggcatcccaagcagaggggtcagcatggtcgcctgagatgcatgcctgggttcctggccctctccttggcatcctaagcagaggggtcagcatggtcacctaagatgcgtgcccaggttcctggccctctcctcggcatggtcgcctgagatgcatgcccgggttcctggccctctcctcggcatcctaagcagaggggtcagcatggtcgcctaagatgcgtgcccagattcctggccctctccttggcatggtcgcctgagatgtgtgcccgggtccctggccctctcctcggcgtcccaagcagaggggtcagcatggtcgcctgagatgtgtgcccgggtccctggccctctcctcggcgtcccaagcagaggggtcagcatggtcgcctgagatgtgtgcccgggttcctggccctctccccggtgtcctttagtgctgaaatgtcacttactcagaaaggtcttttctagatttccactgtaagccaaaaataaaattctgagcccctcaaatgaccgaatgtatctcccttttgaccaagggaatcccagagaaatctggaaaactagtccaggccatgatggaaaaagggcatcagacatgcctagctttggagtttaggtataaccgacaagcatgaacactgaaacagagatattaagactgacaaaatagactgcagcaataagacactgaattccgacctgactgtggcagagcatcgcatgacagataacagatatcaaagtttcttacccccaaaaatgtttctctgacatagtctgaaatgttcctgaaaagctgtctcttgtgggggaaatttgcattctgtagagaatctccttcccttagtaggttttttttttttttggagagtctgacacctttttttttttagacagtgtctcactcttgttgcccaggctggagtgcaatggcacaatctctgctcactgcaacctctgcctcctgggttcaagtgattctcctgcctcagtcttccaagtagcttcaattacaggtgcccgccaccacgtccagctaattttttatatttttagtagagacggggtttcatcatgttggccaggctggtctcaaactcctacctcaggtgatccagccgcctcagcctcccaaactgctgggattacaggcgtgagccaccgtgcccggcccaagtctgatatcttttaatgtccaataagagaaatttaccatctattctctgtgatggctgctacctggaggcttaatccacatgacaagaacctgggctttcacaacccccttatttatatttgagcatttatttctgctgacctcaaactcttcaggcaaggcttaattctttcaaccaattgccaaccaggaatctttgactccacctatgacctggaagcccctggcttccaaaagtccacctttccaggccaaacaatgtgtatcttccatgtattgacttatgtctttgcctgtaacttctatctccctaaaacgtataaaaccaagctgtaacacagccatcttgtgcacatgttctcaggacctcctgaggctgtgtccaaagcccctgggccttaaccttttggtaaaataaacctctaaattgattgagacctgtctcagttactttctggttttcacactcaaaaaatgccgtatctttatgatcttaaggtaagtaaaaatatttaaacagggcacacacatgaaacatataagacaaactcgacaaactggtctatattaaaaataagaacttctgtttatcgaaagagatcattaggagagtgcaaacagcaagcatgagagcagagtgtatactcattatacacatggcaacaaaggcctcagggccagaatgtgtcaaccagaaataataacatcctccccatgtacctcaaattccatgatgaatgtggacagattttgaaacctacaaaatgcttcatcagtataaggaatgacatgcttggtcttcttggtgggtcactgcaacagtcccagatggagccgaggcagtctctccctttcgcatggcaaaaccagggatcgccaccctcccacctatgcccattacctacaagatgccacccagggtccttggcatgtcttttacagaccttcatcctttagtccttgctgtcatctctccccttatcctcaccattggccccatccatgctgagctccagcccccctgagttgctttgccccgattacaccacactcattaacatccctgggccttccgcaagctctttcctcttcccaagatactctttcctccctgcactggcaagccaccacactcagctgaggatttcaggggttcaacaccacagctgctttgtggcctgctttagagaaccatacagacagggactgtataccaaacacgtcagccccactccttggtcttgggaatggatacaaagaaagcagagatgccaccgaaagaaaggaaaaaaaaaataaaaaaagcctggcagggaagttccagatgatgttgtgtgagagggtggtctctcagaataatcccagcagacgcacatgcacttcctgcctttcctatgagacttccctgtgagactgtgacacagccccgaatcctggctttggcagctgacagacatgggtccaagtccaagctctgccagttactagataaatgaccttgagcaaattactccagctccctcagtttccccatcgatcacttggggtaacaaagccaaccctgccactacagacatcagactaagccactcttgtggtttgaagatggtgaggggaatctgttggattctagttgagcacgctgatgactcatcagttcaaatatcacgtggctttcctatttcccgtgtcagttgcagggcctctaaaatggctgtgacttccatcatatgccccattcgtggctgtccccaggcactggaaacaccctaccttcatctgctgtgccaggcatgccggcctcccccaggcttttcagagactctgaagatttcccaggcatgaacaccttgcacatcccagacacagcccattgcttgcagcagatgtagcatcaaacaccctttgtgattctgaggatcataaaaaacattacccaaaaagtttccttttaaataccaatggttttctctgccatgccacccagatttcaaccgtatgcagcttcatgctaagagcttcactgaaagtaaatgaaagggacagctttagagttggctgaagactgtttgtttgaagggagactgtataagctggtataatgtttaattctggatgtctggtggagagatctcttagtagctatgggaagaaaaaatagataggtatttaagggttttgaacttgggaacagagtggagataaacgggcaaatgtgctttggataagtccaaagtgacatgtttgaatacacacacacacacacacaaacacacacacacacacaaagttatactgaagattatagctgaagattcctaaacaagtctaaagcaagcctttcttaaagaagtgtacagttgggatatataactgctataacaaaactcaagatttcaacagcttaacacaataaaaaatggtatccctcctcagatcacagtggttgagccactctcctggacagccctcctccatgtgatgacacaagtgcccaagttccttctgtcttgcagttctgccttgcttggaccttccacatctaccccatgaacccactggaaagggaaggcaaatgagagtttgggaggttccatatgcagggcctacgggagcccatgacacttctgcccacatttcacagaccccatctcacggcagcagtcagacatgagtcccctgtgtacctgggcttggtgaacacataaccgtctccgtcactagaatcactagaagcattcaagctaccaaaaatatttcccttatcatttgatgtctaaccttcactgaccttttaacaaacctgttgaacatctgccctgggccaagcatgttagggcaggagaccagagaaacacatgtgcatgtgagaaggggcggcacaggagtttggggcccaggctctgaagttggaatccacaggctcaaattctgcctccatccctttttaagcaaaataataccatgggcaatcaatctaatctctctgtgtctctattttctcatgggtttagtggagacaatagtgtttatatcacagatgatggtgagaaccaaacaggaaaatacaaacagggtgtaagccctgcccagaactccacagtcctacctcctcctcctgagaccaagggatccccgcaggtggtgaggggtttgcatgtttgttttacctttaaaggtggggaagaaaagcttcctccaggatgctgggctatcctagagacagctgggccaggccctcctaaggccagcatgcaaaggccacagtgaggggccctgtgtaagtcacatatatccaactggttaccagttaccaaccagttattatacccccaatccacaggcttagaagccctgctaccattacctggagaagactgccctaccctgctcctctccacatgggtgtcagccaggatgccctggccctgcctctcctacagcttctctccccatgccagaagcaggcagcctgtaaatgttaaggctcatcttaggatagagctgcccaggtgggcaaccggcaggacaggctttcccctcaaggacgaagacagcctgggaggaaggaatggcagccattctcctgcctgcctggcccaggaagccctgtggtaggaacccacatagacaaactgagttctcctgtggtttttctctgtccatcagggaaaatgccattttagttattgttgttatccacgctattagcataggaaaaggataacatttttaacaataacaaccacatgtaaagcactttataattttcaaatgatttatgccagcatagcggcttcattccttgaagcaagatgtaacaggctgggaatttatgcaccagacattttaagtttcctcagcagaggtgtcagtgacttgcccaggggccctggacagaactgcaaataagggctgctgactcttctgaccaagggcggaatcagggccagaagggatatttggcctcagtatggactacttcatcagacaaattttttctggtccttatatcctttccactctcagcacagctgtccctcaagatcacagataaaaggcactgtcaacgcactattagacaccaggggagaagtcagtgcaagaaggtcaggaatgaggctctggggtcaaagtaaatcaggccaaaggacaatagacattgaacctaccaccctacccgcttcccatcccaaacggataatgagaaagttgaattaggataaccctgggttcctgattccagccaaacctcgatcccttaactcagccaagtgctacactgagtgccagggacaggggcataagaggactgggggaggcctcagccctgcccccagggaacttgcagtctagcaccgactttctattcctgtgtctatcatcaacgttcctccccaaatttccacaaacatccaatcaaaatgtgctaagctgtaaaaccttaagtagaaatttgctcctaatagagtctggaaattttgatattgccctcagcgcagtcaggcaggaaataggaggctacatggagatggaaggtggcttgtgcgagttaactaaggagccgacttggcgcttctgattttctgcagggacaaaacatcaggtatcagggacctttagatacacatgagagaaaccctaccccaaggtgggccttgctgcctcctacaacggaggagcctggaggcatgccggcttcaggcacagtgggatggaagagcatgtgtgtgtttcagggaagcctcctctgtctctcctccccattggctcccctctgaagcagaccctcctcagtggtggcagcaactccagggcacccaacctgtgctgttccagcaaagtagaaaaaaaacaagagtttctctcctagaattcccagcaaaacctggtggcatcttattggtcataactgggtcatgtgctaactccagaatcaatcaaggagggcaagggagtgggatgtgaggactgcctcacacccaccagccaggctcccacttcccagaacctgagaaggggtcacatgatccagacacaaggaacagtgtggtctcccagggacctcagaggtgcctgagcagaggccacatgtcagatatgtggtgcttacccaaggggcagggtcttcacccattctaatgtgtaatcctctgagtgcaaggactctctgaaagtcttggcacacatccaaaacctttcagggttgttgtaaagaaccattacagctgcaggcagcaaaacccctgaaagagggcacatggcaggttggcagctcccctcctattcctctccagagcaggaaccccatttcatcttccaatggaagagaatgctgcaggacccccatctccccccacagccttccctgcttatcaaacacatcatacagccatctctaaaaagtccacaaaacccaatacacatccaagaaaataataattagatatctgaatgctgggctgagtctaaatgagtcacataggtcttgtttgcatcacacaaaataaagttaactgtctcaaaatagagaggaagaaaaaaaaaagtttgtgacatcttttcttctggcagcagccaaatatgatgagcaagtaataaaacaattccatttaaattgcacctgctctcaactccctcgccctctgtgcaaagcagattacattgtcttgttttttttttctaaatcaatgccctgactataatgatgttatggagtattaattaatcctgatgatcactgggagcctaatccttaaggctgctggagttggaccatttcctcctatcctgaaggccaagtccttgcaagaagtcaaagcccattgaaaggattaaatcaattgttgaagcagtgagatggtggggttcaccaattttcttttcatggaggaagattctggagagaggtagtgaaacagatgagtcctggccagaaggcccccaattgctaaacgttagcatgcaactttctttggaactcagaacaaacaatctctctcaacagttctctgcaatatatctctgcacggcccttcagcaatatatcaagtgatttctcagtgtgttttaaaaataattgaatccaggcatattttcacttcagtctcaaagtctcatggtaatctcaacacaaatgccagatcaagtctaacatgaatgattgctgaatctattttttgtcattatttaaaataatatttgacagcaccttgctgggtgaggaaaggcatacatagatatttggctacctctggtaagtacacattagatatacaggtgctcaatcattttgctgggagtttcaactggcataatgcttttgacggccacttggcaaatgccagcattttaaaatgcattaaccctttgacctggtacctttgtttcaagaaatttataccccagatattcttgtaggtatgcagaaaaatagtctatacaaggatatttactgtaacatcaatgtctgcagaggcaaaagacaaagcatcctaaatacccattactgggggaggtgttaaataaatcatagtgcatctaaacaataatatattttacagacattagaaacaaacagtctgctttgtatgtatggatttagaacaaattctaagatgtgcaactaaataaaacagcagggtaaataactgtgtataggatgctatcatttgtcatggggaaaagaaggtaactcatatacatttatgcttgtcaatatagagacagtctctgaaaagattcactaggaactatttacttgtgaaatctttgtcttctgatggagaaagtaaagagacccggggacttgatccaggaagatttgcttttcactctataccctcatgtgcagtgtgagctacctgttgaaaagcctaatttaaacaaagtaaaacaaacataaaaattactgttttattgaaaaatatcaatacatgttcactatagagaaataataaaatagagataaacaaaagaaaagaaaaattggccaaagagaatcctttcatatccttccaggcatgattccaaaaattctgaaaatggtttcatactcttccaaaactatttctatgcacttttaaacaaaaaggggattatactggtaataacatgtttacattatagttttattaagagaattaaacaagtgagtaaagatataaacatgctattatctgctccacactgtcctaagtgacataaatataaacatacatatttataagtataaatgtataacagtaattggctttgtaaatttttttcgcttaaaacattgcaaacaacttttaatgttagtaaatattcatctaaaacatcatttttaagcgaataaactttatttttcagaggagtttcaggtttataggaaaatcaagaggaaaatacagtcttcatataccccctgtctccacacacacaacctcctcactatcaaaattccccaccataggggtgcatctgtgttaattgatggacctacactgacacatcattatcacctaaagtccatgtttacattagggtttctcttggtggtgtacattctgtgggttttgacaaaagtatgatgacatgtatccaccactgtagtatcacacagaatagttacactgccctaaaaatcctgggttcgtctattcattcttccctccctcctaactcctggatatcactgatctttttactgactccagagttttttctttttcagaatatcatatagttaagtgatgcagtatgttgccttttcagatttgcctttttcatttagtaatgtgcattctcttagtaatattcacttagtaatatccacgccttttcatggtctgatagctcatttcattttggcaccgaataatattccattttctgaatgtaccacacagtttatttgtccattcacctactgaaggacattcttgattgcttccatgtttcagcgattatgaataaagctgctataaacatccatgtacaattttttgtttgaatgtaagtttctatctcccttgggcaaataccaagcagtatgattgctgaattataggttttgttttataagaaactgtcaatctgtcttccaaagtagctgtacactttgcattccaaccagcaatgaatgagaattctggttgttccatgtaatcaccagaatttgttgatgtcagtgttttcaattttggccctcctaacaggtgggcagtggtatctcaatgttttagcttgaaattctctagtaacatataatattgaacatctttttatatgattacttgccatctgtaaatattactgggtgagatgtctattcaggtcattttcctaggtttaaattggctgttactttttttattattgaattttaagagttttttgtatattttggataaaagtcctttatgagatatgtcttttgataatattttctatctatggcttggcttctcattctctttacattgtcttccatagagcagaagtttttaattttaatcaagctcaagttatcaattatttctttcatggatcataccttcagtgtcatatctaaaaagccatcaccatacccaagcttacctagatattctcctatgttattttctatgagttttataattttgtgttttacatttaggtttataatccattttaatttttgtgaagggtgtaagcagatagtgtccagattcatttcttttgcatgtggatgtataattgttccagcaccaattgttgaaaagactatcttgactccactgtattgtctttgcttcgtcaaagatcaattgattctatttatgtgggtctatttctgggctattttttctgttgatctacttgtctattcttttaccaaaccatactgtcttaattactgtagctttacactaagtcttgaatccagagagatggcctccatattactttaaaatcagtttgttgatatccagagaataacttgttgagatttttatccaaatttcatttaatctatatatgagttgggaagaactgacatcttgacaatgttgactcttttcattcataaatatggaatatctctccatttatttagctctttgatatctttcatgagtcttgtaatttttcttgtatagatcttatacatattttgttggatttttcctaagtattttcaattttcagggtactaatgtaaatggcactgtgtttttaatttcaaattttacttgttcattgctggtatatagaaatgcaattgacttttgcatattaaccttgaatcctgaaaccttactataattgcttattccaagagtattcttgccaaatcttttagatttttctacggagaggattatactctgcaaacaaagacagctgtatttttttttcttaccaatgtgtattgtatactttttgtgtttttttttcctgtcttatgtttagctgcactttcagtacaatgttaaaaaaaaggtggtaacattctttgccttgttcctgatcctacaggaaaaattttgagtttctcaccactaggtgggctgtatttcttttactcgtttagtggttgtcctagagttttcgatatacatttacgactactccaagcctactttctgataactctgtagcacttcacaaagtgcaggtgctttataataacaaaatattcttaattcctccctctaccccttgatacacattttgtagttgtctcacagtttttagacactctgttctgttttttttttttttcctcagtcttttttttctgtttgcttttgagttttggcagtttctactgttatatactcaaactcaaagaatctttcctcagcttatattatccatctgttcttgcatgttatgtactttttcattaatacccttagcatattacttatgtacatatttgtaaagttcctgggctgataattccaacactcttgccataccagactctgattctggtgcttgctcagtttcttcaaaccgtgtttttgccttgtcgtatgccctgtaatttttgttgcaaggtggacatggtatacttggtacaggaactgaggtgcacagatgtttagtactgcaatggcaaggtgtgtggagagaaaaacatcctgtgataaagtcagcttttcacttgttattagaacaaagtggagacttctgagctccaacctgccagacaataaaccagaagtctgaaaagcagcattttaaatttacatactatactttatccccttcttttatgtgtaatgtaattcttttttcttttaaacaaatttaaagaccaactaaagatttcaagctgacctacttgaatttgcttcacctcttattttccgctcttgtttttcttaggtatagctgatttgattttgcttctgaagtctgactttagagctggagacttaatttggatactgggctaacaagctttacaaaggagttagaggattcagctagcagccattgaaattcaatatatcttgtctttctgaattcccataaaatactttaatgttccattgattgccaactcaactgttttaaccagtacctaggacctacttggcagacagtcagttttgcaagatattatgccatttaattgcatgataatattacattcatgatggtaatataaatgaggcagtaaaaagcagttgtgaataattaaatgtcaaggactaagaaaatacattggatgacactgaagcatggtataactttagaaagacacccttcaatttcgaacacaggcaggcagcgtatttaatgagcagaacctatattcttgttaagtttcactgctagaaccaaacctattttttcataaaggttcaccagtctttagattctgctaaaactcagttggagaatttcttttcacagcttctactgtctaaggtttcacaatataagaaatataaagtttctcctcttctaaagttggaaagttttatataagaattttcttgcgtctccattttcctcctctactgatcacaactccctcctgctacctcatgtcctttggttcccgggcaggggaattcttcagaaaataatccttccaatcactctctgtccttttcccctcaggtctagataagacaagccccctcaggaagccaggacaaagacgtgggagaaaggcaggtagagtggtcaagaaatgttcttttcaggcaggaattggggtcctcagcctatcttggcagagactccagcaagaaaaatatctaattcattcatccaattaagtggctcttaagcacctgcataggttaagagctggaacagaagtggaagggcaaagataaataccttccatccgatttagcagagaggaaaagcaaggatccagggagtgaggcaataaaaaggaggaatctctaattgccaggactcctctttgagcagtcagagccctgttttttgtggggatatgctctgatgtgctgcttgaggttggtgtaggaatgagggtgactctgaaggatcacaagactgacttccagtggggtcagggtgagcaagatggaggcagaagctcaagtgaggataactgtaacctccagtatagaagagagaggagtcagccaaggtagtgcctgctgggaaagagaagagagaaaaacaagcccactcacctccaggaggctggcctagcagggattcagagcacagagacccaagacatggctgcattggtaggccctcctatgtgacaaccctcctcttagtttccacaaaatatctttgtatgagtgttttcttttaggaaaccacaaaatagaattagatataaactcaaacaactgcaagttttagtcaacttgggttgctctaacaaaatgccacagactgggtggcttataaataacaggaatttatttttcacagttctgggggctgggaagttcaagatcacggcgccagccgacccagtgtgtggtgagggctgcttcctggttggcagcttcctgtcttcattgtgctcccacatggtagagagcagaaggagcagctctctggcttcttctcataagggcactcatcccatgcatgggggctttgcccttgtgacctaattacttcccagaggcaccacctccaaataccatcacactgggggttgggatttcaacgtataaagtttgggggaaacataaacattcagtccgcaacacaatacaaagagaatcataagagtcacgagaaacaggcagataaagagacaggctacaagaattcagggggcaaagtggtcatttccagatggaagttaaagacagccttcacagaagtggcattgaagaacagaggagtttcgaggctaggcaaggggagggtgtcagcactaggaagggaatgccaggcatggggaagggtgtcagcaaaggcatcgaggtaggaaagtgcagacctgggcaggtaccagctaggggtcaggtggttttgcaccagctccttctgccccttcccgcaatttctgtggaacaaggtaatggtctattggctttgcacagctaaggcagattctcaggttattcagatatatcctccagaaggaatgtaattaggggacagaaaggcactgggtaactttaatctttctaaagagctgcccgtccctccctggagccaacagctcatttttattcctcaactacttggctcccagaactgattgctgattccggctgtttggcagagggcgattgtgcatgtcctgggagtgctggccagcttccatttattaatggagactaaacttacccctgtctacctcctctcccacttcacagagaaaagttttctcagtctctgccacacacgccactgctttcagagcccaagacagggctgcaccttaagatgaattggattctcactaaaccaccacactctgtgatcacctgtggagatctttgttgaggaatcctgggttcctgcagcagccaaagaaccagcaccgatacctaaatgtgcatagtcattgacatgcttcattttttatcaaatgagactagcgggtctcacacctctcccactttctcagcagcctctcctctttcctaatccagtgcccttccacactctgcagtggcacctacccagttccactgatagccccagacgcagcatacttgagaataaagagcaggcctaaaagaactgcgatctggtcgctgtttctttccttgctgtatgaccttgggtggggcaactaacctttccgagcctccgttagttcatctgtaaaatgtaaatagaatgcaaagttattatttcatacctcccttacaagaagctttttcaaccgtgacactttcagcatttggggccagataattcttcatcatgcgtggctgtcctgtgcatgggctatttagcagcactgctggccagcagcaccccctgaattgcagccattaaagatgttctcaggcattgccaaatgtcccctagggggtaaagtcacccccagttgagaaccactgtcttacaaccaccttgtgagccaggtagaataaagggtagaacatgtccaggtttggcaggacagacatttgggaatcaaagagaatgctctggcagtggtgacatcctaccccacatggcccagggaggggggttctactgataaaaagcagatccaggaaagagatacatgtgagagatgacaagggttttgaaaccagttaagattttctttagcagaaaagacaaaggtctttgtcttttcacctaagggcaaaccctcttcattactgtgaatattaaccttcttccaaagactctgtcagtcgagtctcaccagaggagtagacatttctcttattaacaagaccttggccctgtttcctgcaaaataataactgtagcaccatttgcctaaggaaagaaaagatggtcttgccttgaaggagcttcccataataaactattgaagctaaaatttctactaatactatattgttgtgttatagtataatttcaaaaagataaaaatttgacttttatgcaaatatatgataaatatgtgtcaaagattttacttaactcattaagaggcaaccagcaagacatcaaaactctatcaaatgagaatctgaggaagagggtattttaggcaacttaaaagaacattaggatgagtgctacatgagatgcaaaactaggtaatgctctcagggccagtacccataaccattggggttatctgttctttatttttttcttagggacagggtctctctccattagccaggctgcagtgcagtggtgtcatcatagtttactgcagcctcaaactcctgggctcaagcgatccttctgcctcagcctcccaaatagcaggcacacaacaccacacccagctaatttttaattgttatttttgtagaaatgagctctcaccatcttgcccaggctggtctctaactcctgggctcaagtgatcctcctgccttggcctcctaaagtgctgggattacaggcgcgagccactgtacctggccagggtcatcctttctaccatttagaaattatttgtatctcaaccagaccaaaatctataggttcacttctgccctgtggaactgtaaagtagccctgtcagtagaaaatcaatgagaggtgtcaatccagcaccccccagaaagaacgcccagcaatcccttatttctaagtttgggctaattcttctaatagttacatgaatattgaatgctgccctcccaggccctgggcgaatcacctctgcctctgccttcaataattaaagtctaggagagcaacagacacacaaaagttaatcacaattatgttgccagataaaaatatacattatcccatctggaatttttacacattcctggtgaaaatctacgttggtacaactctttagcagaacaagatatatatatatatatatatatatatatatatgaatgacagggtcttgctctgttacccagggtggagtgcagtggtgcaatcatagctcattgcagcctcaaacttaaattttttctgtagagatggggtcttgctatgttgtgtaggctggttttgaactcccgggctcaagcaatcctcccacctcagtgttctaaactgctgggattacaggcatgggccaccatgcttggccatacttctttttttttaatagtatttttttgtaatgtttaatttttgtggctacatagtaggtgtatatttttatgagatacgtgagatattttgatacaagcatgcagtgcatcacaatcccatcagggtaaatggggtatccatctcctcagcatttatcattgctttgtgttataaacattccaattacactcttctagttatgtttaaatataaaacaaattatttttgattatagtccccctgttgtgctgtcaaatactagctgctattcattttatctgaccatatttctgtacctattaaccatcctcacttgccccgccaagtaataattattaatggagggcagggccctggccctcacctcatgagctgtgaaaacaacataagtcactgtcagagttgatgcaacaagaaatgtagaggcttaaatatataaaagtagtcaaatataaaaactaaacataataataggaatagcacacagaaaggaggagagaggtacttaaaatgccatctgttgatacactggggtaccaagacatgtctaagaaaattatattttatgttgtattttggaggtaacctccagcaatcagaatagaaatggctagaaaggctgtctgcagggtgggcttgtgaatagcaaggaggggatgccctggctatagcaggacacacaggaagcatgctcatgtttggctgcaggagtgtgggaggctccagtgagcagctgcatctcaggtaaggcccagagactgatgggagattgctagtttgtcaactggacagttggaggaaaagctttcaaggtagaaggaacagaatgtgcagcagcccagagcaagaaagagtaagatgttcaaggctgggagatggggccaggcaggtatgggctggaccacagaggccttatgtgatgtacaacaaagtgtacaaagtgtaattttaccctgtaggcatgggacaccaaacaaatgtaattatttttgttgtatatcttattttgcaggaatggatataacgtcaggaaactgagacacaagaatacccagtctcatggaggagacagagcagagatgtttatatatcttctgtcctcacttgccatttctcaggacttatcaccctatatgctagatactaggaccacaatctgaataaaatacagtccttgcttctcagagactcacattctagcaaaaaaataatttttaacaggagagttaatagcagtaccagtgatttaaaacaaacaaacaaataaacagacaaataaaaacaccaccaggcagttcacaatgagaagcagaatgaagcagcaagagcccaagacacaagacatgggtgggactgacagcaggcccctagatgcagggtgggcttcctggaagaggaaggccttgcaagatagtcaaatacagtctagtgcagacaggaccagggcttccaagccagaggcatggcatgggcaatggcattggtctataggactcaacttccatccctcatccccaatttctccttcccgctttccagagcttctataaccaggcttgatgggatgacattgtaagacttaatggaggcttcttccaggccttcaactttcttgaattttctgtctggatcatgtctaccctgagggcagtgcaaagagtcagttcctgacctctgagcttctagaacaccttttttgtttctaaaacagagatctttcagagaaacggctgcttgagaatcaagaactaaggcagcagaacgagcacaggtctgaggagcatatgctttccagatcctcctgcacagagacaggtggttcgaaaataataaaatgaaacggaaattagaaagaaacacctcttgagtggaagaagggcagatattttatctagaattaaaataggtaagctttagggtgagtgtctgagggtaaaaagagccagaacccttcttattctgagatcaaaaccctgggtgaagccgggcacaggggctcatgcctgtcatcacagccgatctgggaggctgaggtgggcagatcacctgaggtgaagagttcgagaccagtctggccaacatggtgaaacctcatatctactaaaaaacaaaaatattagctgggtgtagtggtgggtgcctgtaatcccagctacttgggaggctgaggcaggagaattgcttgaattactcccaggaggcagaggttgcagtgagctgagattgcgccactgcactccagccggggtgacagagtgagactccgtctcaaaacaaacaaacaaacaaacaccctccccccaaaaaaaccctgggtgataagggaagtccataggaccccccagaagtttaggaaacctgacagcataggcgacctgagcttccacttttggggttgcagatgccagagcctgcaggccccccatagaggcttcatgaagctggctgggcagagggggctgtctaggcaggtaccccttgctaaggccccctggagaaagagagagatggggaacaggccagggaaacttgagaagttctgaagttatggagaggacacagaagttctgttgggcggacccaacagaaaccgaggcccatacaggagatgccagcccaagtgtcagacccactctcatctcaggtgacagtgccacttgctcgttcctgacctccctcccttactcctgccccaccctgcagcctgcaccatccacacctgagctgctcacagtgattccctgggggagccacagaattctaaacaagttgagggatcagaaggaaggaagtttaagcttcaagattccctgagtctacctcactgggtacaattaaattttaggtaaaatgtgaggatggaaaacgaattctggttataaagaaaattcctttttttttttttgcatgcccaacttccaggcccatgaaatcttcacctgttaggtacgaaggtctcttaaattgtgctttcacaattcagcctccagcccggggccaaaatcaattgcactttggaaactcctggggtggcttttataagataaaccaatgccaggacccattccagatcaattaagtcaagatttctgggaaaggggctcaggaaatgtgtactttttaattaaaaactccccagtttattataatgaactatcaaaattgataaccagtctccaaccccaaatccaaaaccaatgctccgctgaagtccgtaaactgggcaggctgccctggaggcccactgcccagtgctgctgtttgcaggatttacggctccatcctccaggagtctctggagcacagggtagctctggtgtcactgctctcccatttacagctgtccgtcattgcttctccgccttcccaggtgcagccgtgatcacagcagggccctcacaacctgccccttcctctatgcaatgtctctcatggaagctttcaaattcttgtagcattctgacccctgaatttattgtctattgattgcatgggattcattactttctattgactgctcatgctgctggtattgtggataaatgctaattcctcaataatttataccatatgtggatcatccaaggcaaaaaacactctttttctcccttttatagattttgttcatttccttctggggaacatcatgatccacatgaaatccggaaaatgaatatgtcaaattattttgatttgcagccaggctgacaatgcagcctcggcttcccattgacaccattattggatggtaactcaaggaaaattggggcctttaaggagatgagccaagaagtggggtgctgtccccaagataggggcatcaggcagggttgagatagccttgagtctcccagcaagcccccagccctctaggcagtttctgttctcaccccacaggcccagctttctctgtgctggaaattagaaaggcagtgaacagaaaagttttctttgccctaataataaagaccccccaaaacctgtgttctcatgtccaaaatcctttcccacaaaccaagcttaaagaataccttttttaaaaaaatggtaataaacagaaagtcacggtttagagtacaggctccaaaaaagtctacctgggtctaaatcctggcttctatgtgagctgggacacattacttcacctttccacctttatttcctcaactttaagtcgaggatgctatggaaacgagaaatgacccaccttagcacagcttacctaggagatagtgaacctgaattctatcctccccagcttgagctgcggaagggccatgaactctgagcatcctggagttctagactctgtactgcacttgtctacagttgctctcctgggcaatgcccatggattttgtttaaaccaatgatgttcagacatatggacttattccatctaattcagagtgctggtttccaatccctaatcaacagaactgccatgaactatatgcccttctctcccagcatttcaaaaccacagcttttccctcttagcaaactgcttggtaaatttcttcattggtttgtatttccttcctaactcccagagttcagaaatcaagctgctttgtttctgggtggtctttgttttcatcattgacaatagcagcagtacttctgcaaaggaggttgaaagaattaaataatgcatacgaaatgcttagcacagtacctgaaataaggtagggctcctctcagtgttactcatgagcctggcataaagtagtgtctcatgtctcaacaaatatttattgaataaataaaaatagtcgtctttctttctttctttctctttctttctttctttctttctttctttctttctttctttctttctttctttcctttctttctctctctctctctctctctctgtctctccttctctctttctctctttctctctttctttctttctttcttttctctttctttttttgagacagagtttcgctcttgtctcccaggctggagtgcaacggcatgatcttggctcactgaaacctctgcctcctgggttcaagtgattctcctgcctcagcctaggagtagctagtattaccggcgtgcatcaccatgcctggctaatttttgtatttctagtacagacagggtttcattatgttggccaggctggtctggcactcctgacctcaggtgatccacctgcttcggcctcccaaagtgctgggattacaggcgtgagccaccgtgcctggcctttgttttttttcttttttgagacagggtcttgctctgtgacccagactaaagtgcagtggtgcaaccatggctcactgcagtcttgacctcccgtgcttaagcaattctcccacctcagcttcctgagcagctggaactacaggcacacatcaccacacctggctaaattttcaattaattaatttagttttcgtagagattggatctcacaaggttgctgaagtttatctcaaattcctgagctcaagcaatagtccagcctcagcttcccaaagtgctgggattacaggagagagccactgtgcctggataatgaaggtagtcttttatgcatttcacatccattatctcattcgaatctcctccaaaacttaatgaaacaggttatatagataagaaaaatggaggctcagaggccgaagtggcttgcccataattgcatatgtaactggggttgatttagaactcaagtgtgcaccccaagctccagatgtaaggtgctctctccttcacagagcactatgacttcaggtgggggcaagtatgggagcaagatcacggtgctcacatggcacttccacactctgctttccctccatcccttcccttcctttccttttcctctcatctgtcaaaatctcccttatctaccttcccctctcccattttccctctgataccagtttcaccatggggaaaatgggggactggacagataatttccaaagggaccatcaccctctttgacaggacataagttcttgaggtgtgggtggctgatacccaggtgcctttcctggaagcagacaaagtaggtgacctgggaacacaaaagaccctgaatcctcaaaggtgatgctagaaggtgcattgggctgaggaaaaagaaaagagagactgagggcaagaaagaggaaagctaagcagcaggaggtgcagaggttaagagcaagggctttagaccagacaacacaggttcaaaacccagccctgccacttatttgcagtgtgaccttgaacaagtcactaaacctctctgtgccttaaggtttttattggtaaaatggaaatgatgatgataacagtacccagctcataaggctatcgtggaggtaaaaggaggtcatacaggtaaaggacagaatagtgtctggcactcaactgacgtctatttttattatttcaagtttgctcatggcagtgctttcctgtcaatgatgcaattcactgcttttatctgcaaaaagaaaagactgccaggcatgcccacacattcaagcccccaagaatccaacccttgaccatctctccagcttccatatcttcaccttatacagccccctctctgcttcctcgagccctcaaacctggctcttgttctctctggagctcaagccagttccccgatgttagttcctgtctcccttcaggtctcaacttctcagacaggctttgcctgactcccatagcaccttgactcccatggcatcagactaaatggcatcttcctgcatgaaaatgcaaactccagaaggacagacaacctgcgaggcatggtaacctatgcaatagtttggggctgagttgtttttgtatgtttcttcttaaggaacacacattgacatgcttgcacacccatagggcatgtctgaaggatgcacaaggaccggaagcagaaactgcactaggaatcacctacttttcaccataagccctaggtgccatttaaattacatgtcatggagaattagtacttaatcaaagcaaatccacaaatccacattaaaaaaaattaaatttggaaggccagggttggtggctcatgcctgtaatcccagcactttgggaggccgaggcgggaggatcacctgaggtcaggaattcaagaccagcctggccaacatggtgaaatcccatctctactaaacatacaaatattagtcgggcgtggtggtgggcacctgtaatcccagctactggggaggctgaggcaggagaatcacttgaacccaggagggggagtttggagtatgccaatattgcaccattgcactccagcctgggtgacagagcaagactccatgtcgaaataaaataaaataaaataaaataaaataaaataaaataaaataaaacaaaacaaagtaaaatttggaaactatgatccttcaaacaggataacagtggcaaaggaatttttacacaattggtcaataaagaacagaacaaagagaccagaaaaagacgtagcaagagttgccttggtgttcacactgcagcagtcacccagatccttgcaagcaggctgttcccaacttcctgacaactagcattgctcaggcgatgcttctgtgcctaacctgcagcagccacgggacacactagtacacacttggccaggcacaaaatggcctcaaagtctccaaccacaacactagaaccttaagacaaagcagtgttgatacagtttcagtctgcatccccactcaaacctcatattgagttgtaatctctagtgttggaggtggaggctggtgggaggtgattggatcttgggggtggtagctagtggtttagcaccattcccctactgctgtctcatgatagagttctcatgaaatctggttgtccaaagcatgtggaaccttccccttcgctctctcccttcctcctgctccttccatgtaagacgggccggcttcccctttgcctttcaccttgactgtaagtctcctgaggcctcctcagccatgcttcctatacagcatgcataactatgagccaattaaatacctttttttttaaataaattacccagtccccggtcgttctttatggcagtgtgagaataaactaatatatatctttaaaattccaaaagacaattctagaattctatatacaaccaacctatcaaacaaatattagggtagacttaagattctttcagaaattaaatgcctccaaatatgcacaaatgagacacgcctcctgagcaagctagcagagcttgtgctccccagaatgagggggtaatctatgaaaaggtaagacataaggttcaggaaacatagaatctagcaaaggagacaggtgaaagaaattttagacgcccgtcttttgtcttagcttagagtcccccaaagcagactctgagacaagaactcatgggcaggcagttaaatttagaggcaatcccaagaatctcaatgaaggcatgcggacgtaagatgagcaagcaagaacggccagtgagtggctgacagtgcacaggttcccactgtggggagtgagtgggtgacagtgaacaggttcccactgtggtgaatgagtgggtgacagtgaacaggttcctactgtggggagtgagtgggtgacagtgaacaggttctcactgtggtgagggggtgacagtgaacaggttcccactgtggggagtgagcgggtgacagtgaacaggttcccactgtggtgaatgagtgggtgacagtgaacaggttcccactgtggtgaatgagtgggtgacagtgaacaggttctcactgtggtgagtgggtgacagtgaacaggttcccactgtggggagtgagtgggtgacagtgaacaggttctcactgtggtgaatgagtgggtgacagtgaacaggttctcactgtggtgagtgggtgacaatgaacaggttcccactgtggtgagtgggtgacagtgaacaggttcccactgtggggagtgagtgggtgacagtgaacaggttcccactgtggtgagtgggtgacagtgaacaggttcccactgtggggagtgagtgggtgacagtgaacaggttcccactgtggtgaatgagtggatgacagtgaacaggttcccactgtgttgagtgggtgacagtgaacaggttcccactgtgatgaatgagtgggtgacagtgaacaggttctcactgtggtgagggggtgacagtgaacaggtttccactgtggggagtgagtgggtgacagtgaacaggttcccactgtggtgagtgggtgacagtgaacatgttcccactgtggtgaatgagtgggtgacagtgaacaggttctcactctggtgaatgaatggttgacagtgaacaggttataactgtgatgaatgagtgggtgacagtgaacagattaccactgtggtgactggctaagtcctgctgggaacctgctatatgaggccatttctgcattgctataaagcaatacctgaagctgggtcatttataaggtgagaggtttatttggctcatggttctgcagtctgtgctggaaacatggtgccaggatttgcttctggtgaggccccaggaagcttccactcatggtggaaagcaaaaggggagcaggtgtcccacctggtgggagtggaatcatgagggtggggaggtgtcacacacttttaaacagcgagatctcatgagcactcactcattattgcgaggagggcaccaagaggatggtgctaaaccattcatgagaaatccatccccatgatccaatcacctcccaccaggcctcacctccaatactgggggttacatttcaacatgagatctgggggaacaaatactcaaactactgaacatttaagaactccgtagaacacacttcagaattatcctgacaaggtaccaagggccaaggaatctggattcaaaccctcacaatatgtctgggggctatcgccacccattcccatcctttattgactgaggattactctcttaacctcccagcctttttgggctgagccccatgggccacaggccataagcattaatggcagaaaaagtgctctgacagacacaagtgttcaagataggatggcatcagtaagcatggaaactgctggtggcctctggtgtgtgccaaggggatatgggtggtgcactggcagcatctgctgcatctgataaaatgcaagctcctgaggatgggcctacactactccagcatccagcacaatgcagtcacttagtcctgggtggatgcttggatggatggatggatggatggatggatggacagttggatggatggacggatggatggatggatggatggatggacaaataagcaaaagaacatagttgaaaataggatgaacagtaggtgcctgggaaagaaggaagttgaaaatggagtttgaccttcaggcacaccaaactaattgtctttataattttgagacaattttgctaaacacgtgccgccccaccccacccctcacacacagcttcaaaggtgatggggacactaagccccaagccatgccacaagcttcactcactgttggcctctgtccactcactttaaggccatattttggttagaaactttctgtggcaatgcttgcataaatcatattaaatatattctttgctcaatggtactgtgcaccagggtagctagctgtgccaagacagctgctaaattagaatgctcttaaatcagccgcagatgcctaaatgtttatagctttgaagttcccccagccatgactcctccttctcctcccaccagcctgatctttatgatgctttttaaagccagctgcagggtaagcaatgtttgaaactcagcacagggacagagggcagctgtgcacatgtggggtcaaccacaaccccaaggtgagtccagccccggcctgtgaaggatggcaggaaaatgagggaaaggattctttctcacagcagagtcatggagagtcacagcagaataggccccaggggatatccaggtctagaattctccagctttttctcacccaaggccctgagctcaaacacaaccttaagtagaaaacataaacaaatgtaccaacagggtggaatgaaaagtgattttgtttattttcaaaaaaagcgccagcagcttctcaggctgggtggaagaatgtcaccttagagcaggtctctctgagaagtgtcatgtgagcggccccctctggcatgcagtggaaggtgggggcaccagcaaaagtgggataggacatttggtggcatcgtgcccccggagcggaaggggaggagtgggggaggaggacacatttgcaaaggagccaaggaacctccaggaaggaaaagcatcaagaccaactcttccttctggagctctgacatgacgagaaactctggggggtttggatggtcctcactgagcctcagggccccagaagagaaccgcaaatgagctgagtccagattagcggtggggtgggaggatcagttctaggacatcaggaaaagaaggccacctgggcccagtgttttctctctgagaggaggaagcatggcagtgactgacaggagactcctgctgccgccttagactctaaatgatgctgggttaggccatcgggaagcactgggcttccctgccaggctagacaggtaaatgctcagaaatgaagaggaaagaactgcacctgcacctcaggctgatgggttacgctaaacagatgcaagagaccaggtgggatggctcacgcctgcaatcccagcactttgggaggttgaagtgggaggatcgcttgaggccaggagtttaagagcagccgggacaacatagcaagaccccatatctacaaatttttttttttaaaaagagatgggtgtgagggcaggcacctgtagtcccagctattcagaagactaaggttggacgactgctcgaacccaaggctgagactgcagtgaagtgtaatcgtgccccactacacccctgcctgggcaacaaagacagaacccagctctaaaaacaaatagcaagcaaacaaacaaacaaacaaaaaacccaacagaggcgaggctgagtgtagaagaagcagactttgccaagttagctttaagttggaacccgaagtctaaaggcagaggttgctcactggcactggtcatgtcactgttagatgcccacaaagtatagacacttggaagaaaataggttttactactggagaccctccccatgcacgtggtggaatgcataagggttccagttcttcccctttcctgtgtccacatttttgcatcaaatctgcctaggggcaaaaggaaattccctgatgttggatgcagtcacatgacttgttctggccaatgagacactggcaagcatggcccacatgctacacttgtatggtgcggcttctcagcctgtgcctctaccatcacctgggaagggagagacttagagaagagctgccctgccagaactcagtgccagccacgtgaactgcaggaaccagtggctggggtttcgagccagtggcttttgggttgctttgctatgtagcatttctgtggcaatagctaatacaaaaattcaagaagaaatgggcagaccagtcggcactccagggagcactgtcgcctctctcagctgaaacaatgggctgtcctggagcagctggcagccctctcctgagggcagaaccattaggatggtgtctcccaggccctgcccttaaccctgctcctcatctctgccccctctcccccaaccccagccccagaatccctgtgggccacaccatctgtgcaccctcttctggatattgatccatccccaaggtccctgttattccagagactaggctggaattgcagctgcttcctcagggtattctagcagaagataatggaaaaaacccaacttgattctctaggatatgggtgttattaatgttctcctgaaagcagaactgagctgaggacttgggtatagttggtttctttagaatttgatcccaggaagctggaataagaagtgcagagggtgaggaaggaaagggagagaagctacggtgggtctgctgggttcgttgccactgtgggaaactgaggctccatcctgccggggactgtctggggagctgtagagaaaacacctcagactcatccctctaagatatgggaggctggggcatttacccacaggtcctatccccatggagagctgctgtccctggtatatcaattacctcccaccaaccacagccattcccaccctgcacctgcccttgagggctgagtaagtacacagtttggagaaatccctgagaaccactgagagcctggatggcctgaggtgagaagcttgcagcctgcaaatgaaggcagagacagggcaggaggcagcatgggcaccaactggggctgctacactgagggcccataagacaagtatgttaactttgcactgtgatcttgctagaccttcacagcaaaccctgtcttacgggtaaagaaacaggctccaagcagtgagtgacttcaccaaggccagctagcaagtgatgacttttgtccccaaagccctggcagccagattctgaatccattgttcttacccttggcctcagggctttcccattaactaattaatttactcaacaaatattaattatgatgtagacactgtggtaggtgatatggaggattgccgagtacagttgtacaatttgtgcactgtgaaaaaataccatatctaggtcacaccacaacagcataaaatgctgtatttattattctaattttctagcagatggtaataatgtgccttgttctaaaaaaagtgtactaaaacaatgttccagtagatatatgaagagtcctgaggaagggcccttgtccactttgcagaaaggcaccatctgggctcctggcagccctgtgatcaggggagtacagtgtaagagtgaaacagacacagttcctgctctcatcaaaactgtggattagccagagagccccatgtccgactaaacatgccgcaatttgtatttatgcatatatttatatataccgtggatgaaaagaacctagtagtctttgctcagaaagcctttcctggcctatctccctggaagaaagaagaatgagaagaaactactcaggcaaaaagtgagagagagtgtttcatcaggaagagggaacagcaggggttcaggcaggagggagctagatatgtctagggagcttttggaaggagccaggaaaggagtgagttcaagcgggggcgagggaagaggcagacagggcaggacacgcagggcccttagaacaaggtacgtgactgagggcatgggaagccacaggagggttagaagcagcctcatggcactagcatctgtaccaccattttttttttttttttgagacagggtctcattctgtcgcccagattggagtgcagtggcacgatcttggctcaccgcaacctccgcctcccaggctcaagtgattctcctgcctcagcttcctgagtagctggcactacaggtgggcgccaacacgcccagctaatttttgtatttttagtagagacggggtttcaccatgttggccaggttggtgttgaactcctgacctcaaatgatccaaagtgctgggattacaagcgtcagtcaccacacctggccatgcaccagctttttttcaaagcagcctgacctgctaatttgcaggataagagggaagctgaaacaaggcaaattagcaaatagaagagactttttttttcccctggggtaagaaagggccctgttcttgagttccatgcattccaccagctctgtggagagtcagcagtggtgggcaaagtagcaggcgtgacaggtaagcagtcagtctgggagaaaattggagggaaagcggcggtggtgttgactattgtgtatgggagaagagatagagaaagctaactaggtgatgggagatctcaccaactgcaatttcagctgtccacagcaccctgaaggctgcaaaaccactgaattatgccgagaaactgaaggaaggagaccacagggggttcacaccctcaggtgatgaatctacttctagccctgaatttttttgttttctaactgctattcagagtggagtctggaaaactcccatttgcaatactgagatgcaccgcacacccaaataatacctggagcaggcacagagcaagagctgagttgttagtgcccagctcccctcacctcacttggtctcagaagaactctgggaggtggcgattctctaccaacgatggaactgaggcgtgggggtagggtcattttctaggatgacacagccagtgagtgttccagttgggatctgtgtcagtccagcaggtaagctcttgggtaaacactatatgaccccccgccctcaccacccccaggcctcccccttagtcttctccgaattccagcttaagtcattcctattgtcttctactggagctttttcatctcatcgcaggtacataaaatcgccttccctcttctgtcacaatttgccctcctctcttggattcaaaggtctcccctaggaaaccttccctgatcctgtgtgatggggctgtccgcatagttccacatgtgactgtgtgtacacgcatgtgcatctgaagtaacatgcccatttttcatgaactgagactcaaggaagtcaaatgcaaaacaagtggctggcatggtggctcgcacatgtgatcccagcactttgggaggctgaggggagcggatcacttgaggccaggagttctagattagactggccaacatggcaaaaaccctctctacttaaaacacaaaagattggctgggccatggtcgtgcgcatctgtagccctagctatttgggtggctgagatacaaaaatcacttgaacccgggaggcagaggttgcaatgaactgagatcctgccaccgcactccagcctgggcaacacagcaagacactgactccaacaaaacaaaacaaaataaaacaaaaaaaccaagtaagaatccacaaagaaacatccatgaaattaaaaacaaaatgcaattctcattgagatggagtgtttctaagacagtaggaccttatgtcttgtggaaaaaaaaagactcaggaccccaatgcattctgccataaggaaaaaattaaggtgaaagctgagacaggcaataagttgcctctgcatttgttcctgagcagagctacagaaaaaaggttaaagatgagcttttcttatgtaaactgctgatttactgagcgagagaggacttgtgactgactactccctgcactactcctccttttcccttgccacatgtagattcagtaacgtgaccatgctcttccttttggctctccagcctgctcttcccctttaaatagtgaagccctcagggttatctttggagaaggcacagagcacagactgtttttgggattctgtattcctttcttccaggcatgtccttaaccttggcaaaataaacttctaaattgattgagaactgcctcagatacttttgtttgtctgccctccactctcccaccgtatggacatttgagaaatcaatcccaatgaaataaatacaggctgctgtaattgtggcagttcattaggaatatagaatttttttaaggcttcaaggccaaatacctgctgatatagtcaatagcaaatactaataactgcatgcagagaacagcagtgacagaccaggcaactgcgatatacatgaaggcatattcctcatgaatattcaaggccttcttctaggaagaattaggcacatggttgcctgactgggtaaacaggtgatcagcgtttgcagcagatccgatgtaaaaatatggcagctgatgtcagcattgaggccatatgccagaaaacagtatggggaagtcttcctggtaaaaaagcacctctgaagatcaaaatggccccctaagtgacagccctgagcagtcattttgatatttgtccataacaaagtggggaatgtcaaccaaatggcctgaaggtaatggcaaacaggcataaaggacgcagcttccaggcctggcaggagccaggaggcccaggtctgagtcttgcttctgtcaaaacccttttcatctcctgccctccttctaaggccactgccacctctgatgttccatgattcatgcgtggaggaaatgcacactcctcttccgtaatgctaatgcggcttctggctgtgtggaccgtgcaccagatgttgtgctaagcgcttcacagtggagcacactgctctgacctcgggctccagctcggtgtggaagatgcggttccactctcttatttgatcttcacatcaagaaacaagtctattattcaaattaacattcaagatgcttatagtaaaatggaatggcataaactctgcaaggataaacagccatctccttgctctcttggagcaattcaacgggcctcacaggggaagaggccaccagctgcttactgactttgcttggctcagcaccatgtgcacaggtattgccctatagcactgcacaaacaaagcctgtatgctatactggtggtgactgaagggatttttcgaggcctgatttagcaaccggcattataccactaggcctggcatttcattccaggtcggggtctgcaaacaccttcaggggcagttaaggcatgactggctaatccacctggagggtcacagctatgactgcctcaccttttctaaacaggccaacagtggtgtgtatgaggacaacactcccccaaagctgtacccttacacacacacacacacacacacacacacacacacacacttatacacacacgcacacagtaatacacacactcatacacacatgcacacacaagctcatatggtacataccttgagagaaactgttcttgacaaatcactactacctcctaccatcaatgaacttgagtcctcacaactaggaggaatggaaccccagcccactgggaaaggtagaaactgaatattagagcagcaagtaatttggaataatcttatgactcattaaaccttcaaaacttaaagagatgtttattttacactccacctaaaattcagcagttagcacaccttccatccccttcctcgtgggcaggacagcacagctaatcagcactcggctcttgcctctgggtgaactaaatctgtcttcagtcacaacggacctaagcttaatgagttccatctggtcttcgtggaaagccacctgcaccacacaaaaaggcagggaagtttccctgggaaggcattgggacctgaggctggggggacctctggggctggcaccaaccctcaggtggccttgatctggaggagacagcactgtctcagggcttgtaggggcaccacgtgggctcctgaccatgccatccctcacgtgagctccattctgttccattagaagcctctctagatgcccagctctccagtagccatcttgactttcccctctcctcagctcctagactggtagcccattggagaattagcttgtgtttctagctggtgccaggaagatatctgggtcacctttgggggaagtgattgcagggtggtgcaggatattcctggggggactcgttgcaagggtactgcctgaggaagcatctctgctcctttgcagaccaccttaggtgcagccaggcgccaccctagaggagagaagcattatcatagtttcattggaagaagaagtttccagtgacgttggttgccccttatcccacatcagtccttttgtgtctggaaggcttggacccattgcaggaacatgctctcctatatatggagggtgtggaatgcccaaggggctttgggagtggtccatggtggacctgggactgggtagtgggtggggaacaaggttctgaggtaactgaagcccagacctctaggcagagaggctgctcaggggaacggctgtgggcatgatgagacccatcactatctcatgttctcagcctccatcaccgctgtcaaccctgtccccagctccagactgcttctctgtttccaacactcagctccctccataacctcctgttaacttatgcctcagtctctctctaaaactcagagtactctccctaaaacatctttccctttagcactgccaggctggaaacttcaggggctgctcactgatgcccagacgaactccacatgccttggtcctctgcaatccaggtgccctctgctcccaccgccctgccagtgcctctgccctgccccttcctatgcagaacttgtcacagcccagccctgggcccaccacctccatgaagccttcctggcctcaccactccagcctacaccacttctccctccctagggcctgtcccctgcacccttcccttgttcctgcctcttgataacacttccgggagcatgtcattatcacatgtctttgattctaagactcacatttttttacacgtcaacctctctgaaacagggatgcagcagtaaaaaggaggcccaccatgactagctccatgtatgccaagctcactctgggacaaattttgtttctggtttaaagcaaggatgaccacagcaggggtcagtgatgtctcctggcctgaagcagctttaggctgcaactctcctaaatggctctgagggggaccctgcacaagccaccagcccctcaaagggacagcagggagacattgatgtgtctcctcttctcatcctctattgtttctggagacaaaagaagcccttgaaatatttattggagtaataaaatgtcatttaattccttgagcctaaggaagagtggatgaagacctgttcccaggggttgtccctgagcctccccccgggacatgccaaagctgcctcagataaattctcttaaaagtggaaaatgtctctgcctgaggctgcagagtgatcgctaatggaagaggcctcacctgcttcctgtcaccaccaaaaggttcgtgattttgacagctcagccctggggaggagctggattcaggccgggctgccagtccctcgcatgctagatgtgctcagatgtgtccctggcgattagtgtcacagcaggcaggggcatgagtgtctccaggaaagggcccttccccctgcatgtatcaggagaagtaggactggacgccagatacagcaaaacaagccaagaagccaggcctgggagcaccatggccgttagatgcgggctcttccagctggacagaccggcagttctggatcttaacttcaggcgagtgaggcttaggggagcaggctggctccaggtcatgcaggagcagggccactggccctttaccctgtggggttaggaaagctcaatattggaaacggggcccagaggagacagcatccaggggctgttcatggagaccacaaatccggcctcgggtaacaacaccctctctgcgaagaacagaacccacctacccaggagccctacagccaattccaatagcaaatagaaaccagcatcatcagaaagggccaaagggtgaggaaacagccactttcacttgaggtagtcaggaaggcttcaaggaggattttcagtgcacagagtacaggatgaggagagtgagttttccaggaggagcacgtggcaagagccagggccccatgatacgatgtccccagccctgtgatatgatgtccccaggggtccccaccagcccagcagccactggggaaatatctgcaggtgcatcagggccttggggaggcagcaaggtgggaaagatcaaatggagaccatgcttgtttggcacccacagcccatctcaaagtccttgctggaatgcttcccaagacacccatcagtcttccagaaagttctccctcatgtctatcagcaaaaatcttacactttgtcctcataggttttcaggggcctgaggccactttctagaataaaaactgaatagatgcaaaacacagtggtgtatttattttatgttcaccttttataagtattttcaaatacatgtaagtatcagagtataatgaacccttttatacccattactcaatgtcaataattaccaacattttgacagccctgtttcatctgttattcccacctccatcgccttgaggtatatttaaaattcagcaaataaagacagtttttaagaccaaaaataggaaaaaaatgatctatatagctgatgcttacatgctagttacagaatttgtaaaaatgggtatgcattcatggtgtgcctgaggcagtgcacgccgagaatggaacgtcaatctgagctgctgggtaaacatcttcttactctccatcagagcatccgtgaaactgccgcagagagatgtgcatcatctgagtgtggagccctgcagggatgggaccctcatggctgggacagaccctgccccagccagcccccaagtgcagccaggaccacagctggggtgggaggacaggggctgaaagggaagtggcagtgcttgtgacattagaaccctcctgggctgtcactgaaaaactcctccttccagctctccctgcccctgccagctcacttgcatggtacagaacttggctattagagtcaacgcaccaatcgagcctttcatccagtggcctgcagacactggcatggcaacagaagaaaaaactgtgaaagtctcattcgacttgtcttccttctgttttgaagggaaaaagaaaatgtgtcctggcagtcatcattactgacttggtgaaatatcgtctttaatcttaagatctgaacaacccctgtaggtgggcatttttgttttctgtcttcccacaagcaattagaagtttctgctaagatagttaattccctttttattttcactcaaatactcttaacagaatcatgcagactccacattgtctaattagagagcatttacaatggtatcatgagattataaaacaaatgtgtgatgaaatgtgtgtgaaaatcagagcacggtgaggcctcagagtggtgtgtgtatagacagtgccagcttagatgcgtatttccaaggggtcgttgccacctagcccctcctggaagaagccaatgcaaaagaaagctaacccccaaaatgtagggggttagtggtcctgaggaccctggagccagggagaacaatggcttccgtctcattacatcttggcccttcctgcacatcccatgcaacccaaaaagttaccaagacaggtctcagtaaattcagaggtttattttgccaaggttgaggacgcacctgggaagaagaaacacaagtcccagtaggatttgtgacctgtgctttttcaggatggttttgaggacttcaatatttaaaggggaaagagcgatagaagagagggagggatgaaaaaaggggggagggtaggcagtgaggccagtggttgtgtgctcatgaggctttgcttagtgctcagtgaatctacattttacatgtgaaaagatgggtagagaaacagtcaattatccacattttacataagataaagtaagcatgtaggccgtgcctcacacctgtaatcccagcgctttgggaagccaaggagggagagtctcctgggggcagaggatcacttgatgtcaggagtttgagaccagctggggcaacatagtgagactccaactctatttatttaaaaaaaatcattaataaataattttaaacatttaaaaataataggaagagaaagtaagcatgtgaaattacagctgtctgcctgggaacataaaaaagaaggcagaataggtgactcagctcccaagcttaacttgtcctttggcatagtgaatttggagtccccaaaatctactttctttcacatccacataccccttcctgaagacccagccccaggctcagacacacccgctgggaccctgatcgtggagtaagcacatgtgcccctggactcccagcctgcctggcgccgcctgcctctccatcctcctttcctgctgctcttgtctcgcttatgctctaggtttgcactgcactgggcccatctctctccctttcaacagccaagccctctcccatggagggggagctccagatcttcaggacacactcccctgttttggggctgacttcttgtctttctgtatttggctgaaatgttgcctcctcagacaggccacctgtcagcttttgtcattctctgccccattctgagttacctccacagcgctccccatcatctctgttttctctgctttcacacattctgtattccacactaaaatggaggctgtgtggagaagggaccatgctcatcttactcaggctttgagccctagcaccgggaaaccacagggcccggtacacaggagacacaaggtgaaaacatgaaatgaacgagcaaatgaatgaaagcacaaacagagtggaggcccctttgggagactgccacagccccacaggggagcacgctgcaggtgggaaagcccctttgggagactgccacagccccgcaggggagcacgctgcaggtgggaaagcccctttgggagactgccacagccccgcaggggagcacgctgcaggtggcaaagcccctttgggagactgccacagccccgcaggggagcacgctgcaggtgggaaaggctgcccaacacttgatgtgatcctgtctggcgctagaattagtgaataaaattcaattcaattcagaaaacctttactgaggcttattggggcctgggtggttagaacttgtgcaagctgttatggatccaagatctcctctacgtaggaactggagcttcgtaaggcccctgaccaagccacagagaagattctatcttggctctctccctccccttggctattctttctctgattcttttacagcagtttctcaaccttggcaggattgaggcttggggccagataattctttgtggtggggtctgttgcactgtaccttgtaggatggtcaccagcatctgtggtctccactcactaaatggcaatagcactcccatctccagtggtgacaaccaaagatgtctccaactattgccaaatatcccctggggcaaaactctcttgagaacctctgcattacagacttttcaactcctgatttctaaacatcagaatgaacaagactcatgcagatgggttttaaaaccttgaaattggatgagattcaccgggcagtgagcgtagacaaagaagagtgtgaggagaggtgactcctgtatacatatctccattctgggcctcttcccttgtcacaaccaaactgaggcccacttgcctgatgtggtgcccacagcgaggtttttgccgtgatagaaaaaaaggtgcttacttgcagggtgccaggtgaagacaaccaggcagctattgctcaaatcctggcctccctgacggcttgcaggcgagggtttttaaaggcagggtaaatttcaggaaagaagctacaggcaaaataaaaaatcaaatacaccatggaggttttacattggttaaagcttaaaaaggtaatgtaccttgaagtagggggcttataggttgtaggtagagtcaaagattttctgattttgtaattggctaaggaagagaagctttgttgacaaattttgggttactggaaacatgttaactggctaagagtgattttctttaagccccccaggaacaaacaaagcaatgaagcttagttctcacttcccccttgtgtgcatctggactcgttaggtggggtcggcacctctgaaggacaactcagggatacaggttaaggagcagcctttagtttctatagtgaaaccaaacatctctggagctttaacttcctgggctaccgttttaggctacgatatacttttattttaacaagttgcttatttactcctggggcttctttcacatccacataccccttcctgaagacccagccccaggctaggtgtctgaaatttctcttgaaataactcaggattttcctttatttccatgcttagggtctgcaggcccctaaaagaaggggtccctgcttcatctcaccctgaactccaagatcacatatccgacatccaagctggcatccccacttgatttgcatctcaagctcagcgctcccactgctgagctcctaatcctcctctgctctcctcgccatctctcctggtctcagtcaacagcaacttcatccccaactgctcaggccaagagccctgtggtcacacttgactcctctttctactctcaacacaactatcccatcaccaagtaacccatgggctctggctgcaaaacttcatttattccccccagagttgccaccctgggtcaggcccagtgatggctcatcaatgtcatttcacggccacctaacaggttcccagactttgaagtggctgggtctccaggcggcagctgcaagggaactcctaaaacacagaggaaaccatgccactcccgcctgtcaaccctctatcagcttccctttacacctacaaggacatgcacactcctggccagggcccggaggccctgtgtgatcttcaccctgcctgctgcctgacacactggccctgtgctctcccactttgctcctcagtgtccagtacctgctgctcctcctgccaggctccatccttccaaagatagccaggtgcttgctctcttccttccagtgtctgctcaaatggcagctcatcaggaaggccttccctggctacgttacataaaaagcaacttgctgggctccctcacccccagctgacttaaccagcctaactgttcaccatcggactatcctgaactcactggtgtatgtgtgatgcctcttgcaataggatgtgagctccatgagggcagggactgtattgtgttcactcccgtatctccagcacttggaaaacagtaggcactcggtcaggatttgttgatgagatggtcttttgctttacataccttgacggaatacaaccttcacaaggcactggtcaacaccattacaatgcctccagcctgtctcagagactcacccacagttatgctatcctctccaataccatatgaattctgtctccacctgtccaggaggggcttctggggaatattgtctagaatctgatctgtttttttgatattcttgattgataatactgctaattaattctggatatgtccaattattccagattttccagtactcaccataacttatacccaacattatgccttgaagattccaaatttccccaattttatatgtcatacaggggagacggggttgtttgaggcacagccataaatcactatcgataaggaaatgcaagatgagtagaacaagtgtttttaaactctcgttaggctccatggtcaggcaggactaggcggtgttgcatgcaactaacaaacatcccttagcacaggggtgctttggtctcctatactcatatccaaaacccacccacatgttgacttcactgctggaatctgtaaaaggttggttcgtatctctgtaagatactgatggccaggtggccagcacaggtgggatggccctaacctgcccacctttgtggccatagttgcttgttattatatcaagttccaatggacagatttaacccataaaggttgaccaaaggcaagcaggtcatgaggtgcaaaatatgttaaatacaagtctttccagtgtttcagggctttaaggagatggttaattcaacagaatatcagtcagcagaaaatcagtcctttcctttcagggagagtcacaaaaggatactgtaatggatgacctggaaggcccatgggagaaactatggccatagcctcccaactcttcagagaatttggaaaggaattttaaaaaggaatagcacatgagtcaaagtcatctccttagggactggtctataatgtccctaatgatggttggtttctttagagttcacctttcaagaaacctttcccccaccactatcaccatcaccaccagtaaaaggggttcacctgcacatccccaacttgcaatccacagaatgcacctaccaccccttgacagtgaagcctcttcaccttacttgaagaaggattctccttttgtagaagccccgctattaacctctcacataaggaacccagagactgttcaaaacaggggttggcaaactacagcccatgcatcaaacccaaggctctgcctgtttccatgcataagttctactggatcacagccacacccattcttctacccactgcccatggctgcttcctgctaggacagcaaagacctggggcccacaccatctaagacacttactacccgatcctttatgaaaaaaatgtaccaatccttgtcttagagcagtcagccaaatcaacagacacaagaatgccattgtaaaaacacacagccacgcaggactgctgtcctgtcacccacttccacagttagcacacagaggagagtaggcaaagaagttttgcccatcagcattgtggcagatgctgtgtgccccacagcgtcccctgactcccacctctagaattgaaagttgctttctgcaaacaccctagactctgcctgaaatttttttctggccaaacgaggcaagctgaaagctgccccacaaggctgatcttcatcatagatacatgggtagttggtggataaataccttagctccttcactcttcagttgggctaacacaggtacctccaaaaaaattccttttttgtttaaactaattcaaactggctttgtagcccttgtaatttaagagtcccaactaatctcagtgagcttttccacagcatcttctccaggaattgatcagggaccaagatgcccaacacagagtcactgggcgctcagggctctgctgggacagaaaccccaggtaggcccgttgagcaccatgacagtcaatacgccttggctcaagagaacaatgctggcctccctactcccaccattcaaccagaggctcacacttgatggcaagtctctgtggcttctggggctacgatgagaaatgacttctgtcctccaggagcctgcatgacctgcctctgcctctctccatgcttgaggctgccccagcctccccactcataactctgcagactcactgcctttcttccatttctttcaccaggccaggactttgctctcctgggggactttgcagttgctcttccttctgcctggaacatagtccctaagatttttaaattgctggctcattatggtcattcagtactcagcaaaaatgtcacttcctcagaaaggtcttccttgactaccctgtctaaagtggggctgtcactcctgcccccacactctaacacatcactctgttttaccttccaattagcacttgctactgtgagttcatcctgcttatatgtgtgcttatattatcggcctctaacacagctcatgctcccgaagagcagggacttgtctcttatttactactgttgcccccagcaccaagagagcacattataggtgctacatcaatgtgtgttgggtagatgagtgagtaaatgagtggatagaaggaaagagggaggaagaaaggaaggaaaaaagaaaggaagggagggagggaggaagggagaatagaaataagattgattcctctccagaactgcccagatcttacagcttggggctgggttggtcaccacttgagccagaaatgttttcccataaaatacgtatcaatgagaaatgtattaagctgcaaaagtcaactacaatagctaaaatatatgagattctttttctttttttttctttttgagacagagttttgctctttttgcccaggctggagtgcaatggtgtgatctcagctccctgcaacctctgcctcccagattcaagcaattctcctgcctcagcctcccgagtcgctgggattacagctgcctgccaccacatccggctaattttgtatttttagtagagatgggtttcaccatgttggccaggctggtctcgactcctgacctcagatgatccatccaccgcagcctcccaaagtgctgggattacaggcttgggtcaccgtgcccagcctatttttcttacataataagtgtcatgttaggcagttgctagcatcagtttagctgtttaatggtgtcatcagagacccaagctcctttccacttcattatctttagtgtggtggctctcccagatgtgtcttgcctcatggtcacaggatggctgctgcagctcaaacatcacatttacacacaagcagaaagaagaggaagaggtgatgacagctttacctatctaattcctttcaggaaagcaaaagcttttgctgaaaccttccaccaaccacattatatcacattagaaccagatcccatgacatagctacaaggaattctgggaaactgactatatatccctttcagccccgatagcagagaagcaggtgagaaacagggggttggaaacaggtgttctgttgaaccaaattctagtttgtcactgagcatatccccagcagccatgacaactgaaagagggaggacaggaaacatccagtactgaccaaggagggttaacaaggccaccagagagaaatgtttctcacaccgattccagccacatcgacaacttacaatgcagtgagagtgtgctgaacacaatgatttgggaaaacacaccccaggagtactgaaaccaagttgttcttatttcagtaatctgtgggcttcataattaaatgagatgaaataataatggtgggaaaatgtgtcagttttttttttttttttttttagaaaggctaaataactcactacatttagttaggaagttgttacaagctgttaattattttcagactaggtaaaagaaacaaacctgggagatgtgtctggtgtgttaacacatattatttaccccgaggtgacattttaatagcagggaaaacacgggcggtctcccagccctgtgcacattttgccacaagccgctgtgagcgcataaatcctagctctgtcaacagtaatgaggcccagagagcaggcacctgctggggccctgaaattttttctgaggaaaatgtacataattaaggaattgtgagcactcacctctgatttattattaaaacaacacacctagggccacatttgctccctgactcgtcggtgctaaacagacaagtgattaaacatcagcctcacagggggtcccccacactctccctgcaagctttccacatccgggcccctgttcccagagaaggaaaagaaggtgcgtagcagcacggcagtgagggtgggaagtgcgtgctgggaggcctctgctggcccagctctcagaagagcagggctcacggttaacaacactgactgagatgggccacactggattcagagtccatctctaccatctaattcctgtgtgctgttctacttccgaatctcagtttcctcactggtaaaatagagtggacaatggctcctgctttataaggttgcagtaaggattagatatagccctgggcagagtttccagcaaacagtcattgctcctggtcacaggatggctgccaaaacagctaacatatccacattcaaggcaggaagggcgagaagtgggtgacactagccgtatctgtgctattaaatctacccaaccccttgccaacagcagtaggaactgctatgagcttttctgtgctccctaaggcctaggcagtttcttcatggtttcttctatatcctccacctatgaagattctgttcctaaacccactgtctcctgcaggaagccatccctgaccaaatgggagctcggtactatgtcaacctcagtgagagctaccacagtgtatcttcaaatcacagtctctgtggacacatagtgggaggagatggcaagcacccaccaggggggcctttccccagtactttgttatgatgcctaatagatgccatgaaaagacaccagagcgccagtgtaaaagcaagcccacgtgccaggtggaggaggtcatcatggactgctctatcgccagagccagctccccacgaaggaaggagggtgccccaccctgcccgacactgaagccaggctgctcctcacagtgtgtggctggcaagtgggagctggggagattggcaatgcatcagaaagagtctagacgagggcactgcttctgacagaaatcgctcccaggatgctctagacaagggcactgcttctgatgggaatggttccctggatgttcacctgggtaagggctcacaaaggcttctccatctctacctggggctcagggttggtgtgagacagagaaaaacgcatgaggcctgatcctcagggtattgctccgtggtagctgcgtggctcatctcacactgggtagcccaggaggtgagtgctctctgagctggcaggacacaaaggtggcccttcaaaggctgggaagtgagggagggctgctagggacaggagggactggagggacagtgattccaaaaggcaggaggagggctagggaacggaggtaaacatgggcaggctgggtccataacactggatttcctcaactctaagacatcaatttggggatgatctttcaaaactcatgcaaactctcccttaaatgacacaagggtaaagtgcatcttaattccagaatctcctgatgtgggggtggagtcgagagtggccacacctgcatcaggcacttcttgtccccatctctggtgcacgtgtgccctcatctcatcttcacagccaccctatgagggacaccattgccagttctattttacacgaggaagctggaaattggggcttggtgatttggtcaaggccttctgtagccctcgctagctggagttcctgcaaggctcatgggaggcaggggctgtggatggggcaggtccagttgagggaagaagaaaggtagttgcccaggccctggccatcatcatcacccacctgtctcctcctccactcagcaatcagggcaacctgccttccctttgcacttgaagtgaaatccaagcaccttgcacaactgaaaagttcttatcccacacggcctgggccgctccccaccatgtcctttctctcttgaaaagaaaggactcagcctctagtcattcagcccatggcctgctgaccttccaattacagtaacattagtctcctctatttccttcttagctctctgaaattgcctgtttcatttttgtttgcttgttggctccctctggccacacacacactggaatgtgagccccaccacagcaggggcttttgtctttttctcactgttgtacaccttgtgttctccaaatgcaaaagtccaccccacccccagggggtagcatgccttaactttgaaaacgtcacccaaaccagggggcccagtgggacctaagtcagaagcaaacagagctgagcagtgtcccagaggctcgtcctggcctgtgcagatgacccatctctaagcccttcttccctgagaatgagacgcttcctaagtgctcctttcctccctctgctctgcaacttcagacccagttcttctctgtcttgtcctgttaggagtggagctcaggtgcctctccatgtccatttgtcttaccacatcagaggcagcctcttcatcagcgatggcatcccaaggccgctcagcattcccagagtgatagaaactactagaaaagtagttccagaaccttctttcagtggaaagccattggaagcttgtgaccctttcaggacatcagttaacatgtgcttagagaggcctggcctggctcaccttggggtttatgagagaagatgtagtcctgcctttggagaagtcggtctccttagaaaaccaagactggtgcttgcacagctactaaagatgcattcagaattatgttgcctttaaggctaaattgtgaaataaaaacagcaggtggctgaagagttcacaagccacggcgggctggaattgccaggaagggcttctcggaggaggtgggagagcacacagcctcagccctcacagacttacaaggatgaattctctgggagaggaaggtgcttctgagagcataattgaagtcttgatgatgttgaggtttttccaactcgcccataggttttttgttgttgttgttttattttctaatacattttacaactgctacacatgtcgaagtcagagatgaaaacttacatttcccaattaatgccactaaaacgtcattctgacagttccatcaggcatctacagtttcaagcccctcccagcttcggggagctgggagagaagggcaggagcatagcccactcccatgccttaactggccccaaggatgggtggggtttgcaaaccataatcagaagtggagagacaggagtgcttcccgggagaaggaactcaatgggtaaggaaggttccacagatggaaatgcataaggaattcacgggaatcttactgaacatacatggaagcagcaattcctattcaccaagagccctgttgcaggtgctgggggagaagcccccactgctgcagctgtgtcaccgcacagcgtttttctctaattcctctgcaaatgcagaggctccgtcctaagattactactcactgtgattacagacaaaaactctaatgtgcattcgacacttgaaaccctttatttcatcagatcttcaaaacagccccataaggagcagaatctataagctgaagagactgaggctcagagaaattgggtggtttgccctgggtcacacagccagcaaaagcactggactctgcctggcattcttctcttccagccccctcactacgctccccgcagaggcctcatcccgctattctacctgcagtcctcaccagtgtacacactgaatccaagtatcagactgaggaagtaatctttttttatgcagtgtttccccattacaaagtgatattgccttgtcttttcatattccattttccctcaaagctctatcattaaggaatatgttctgacttatccagtaaagtgtttaaccttttttaatgttttattgattcttaaagcttcggttcccccagaagatcctgattgctacattaacaatgtcattgatattcttttaacaggccctctgcaacataaaatgcagcatgggaaagatgagccccaacgacctgttaatcaatgagctagtcttgcatccacctgctgcacgtagcaggagaatgggtggtgagaagatcgactctcaggttccggcaggggctgtgacatccaaggccagacagctgggctgcccgagtgtggagcaaatgccccctttggaggcagttggtggaagaggaaagcatttttctccaggctgctccctccaaccccttacaaccaacctggttttcacaaagccaaattcagcttcaagggcagccatgcattaccctttcagcagagttgagatataaagtcccaatacttttttttcctgagacagggtctcacttgtcacccaggctgtagtgcagtggcacaatcacagccctctgaggtgcaagcgatcctcccacctcagcctcctgagcatctggagctataggtgtgtgccaccatgcctggcttttttattttttgtagagacagggtttcaccatgttgcccagaccagtctcaatctcctggctcaagtgatcctcctgatttagcctcccaaagtgctgggactacagacatgagccaccacacccagtcaagtccaaaatctttagcaaggcatgcaggccctcatgtcctggcttccactccacctggcagcctcatctttcttcactcacccttctctgacatctatgctgcaaccacacccacctaccaggattagggtaaggcaagggaagcactcgcctcaggggcaaaattaaaaggggcaacaaaaaactcagtgatcaagacaaatgttattttaatgcaatattttttaaaaaatcaaaatcagtgcaaaagatccatggttaacagataccagaagttaaaataaagacatgatctgccctgcactcacatgttccagcctcacctgccacagtcgaatcctggccccacctactccttctggtttaccaaactgtactctttctcacctcctgtgccactttccctacctagaagactcccctgtaaatcatccttcaggcatgagctgtgatgtcacccttttcaggcaagtcttccttgacattcacaataactacccacacacgcacatgcacacacctgggactcaagcccctactctgtgctcccgtaacaccctcctagtattcactatatgcgatcacaattgcctggctgtctccctgacccatctgtaagctccatgaaagtggaggctgaacctctactgttgctgtcaccactgtttccagagctggtggcaatggttgggattatggctgcagcgacagctcctctgaaggctgcctgcaccaagtcaggctgggcccacacggagacagatccctgggaagtcttgatgggctggggacctcatgcaggctgctggctcctccacctgaaaccgcatctacagatgctgtgagattagggttgatggacctgaaacactgaaggagacactgacagacatccaggaaacacagaagtttgggtcccgacgtgagagagacagcagcccaaaggaccaggtgtcattttcagggacaggtcagggacggctattttttttttgccagcctttctctgggtggtctgtgcctgtccatttattcttgctgggatattttctgtctcgcagtggtagtggtgaggcagtcgtgacaaggagcctggctgggtggggggagacagagtcagatgcaggtagaccagcaggccttgtgcattccccgcttccccagcccacctccctcccactcctcaggtttgggtgattacagccaaggatgacagctcttgaaacggagagggactaggacaaaagtgccgagactttaataagataaggtgggaagtcaaagggagaatggggctgataagcctgggccatctctaccacaaagcaccaccccttctcctcctaaatcgcctgcccctagtcctcctaccaaccccttgctaaatttaccagaagagacatgagctagggcttgggctttagcccaatatatactccatggtattcacttagcagccaaggtggctgattaccccagggaaatatgaactctgggaggaaagataacgagacaccgaaggatgttcctccataaaagaaagagtatgacacccaacaacctgcactccactgacaaagactctctcctcagccaatctccagccaggctcctctgaaccctcttctcgtccaggcctcaaccaaacgctcacagggtttcttttttcttttcttttctttctttttttttttctggggatggagtcttgctctgtcccccaggctggagtgcaatggcatgatctcggctcactgcaacctctgtctcccgagttcaagcgattctcctgccttagcctccccagtagctgggattacaggcacccaccaccatgcatggctaatttttgtatttttagtagagatggggttttgccacattggccaggctggtctcgaactcctgacctcaggtgatcctccagccttggcctcccaaagtgctgtgattataagtgtgagccactgcgcccagcctgttcacagggtttctaacagctcaaggccatatccctaggatgaccctgggcccacttaaagtgcccacctgagaaaactcaaggctgccaaaaagatttactgtttttttcagccaacacctgaagacaatatagagtctctgtctcccgctctctgaggaaggacaggatcctacctcagtaactgccagcctcagccacaggtgacctagttgcatttacacagtctgcatttttcacttccctaactctgctaagcttctgctttcccatccctatgccctctctgtctcttaaaacacctgttcccctctgcacaaatcaaagaatcattcagttcttgcggaactcttttccctactgcaatagttattgctgattaaaatctggcctcaccactttaatcagtgtccagctttgtttatcgttgatattcagaataatttatgacaagcataataaataaacacaaaaacatgaaaggctactgactaagccattataaacaagatctaattagaaatttggagaatggaaatgagaatgatggaaatatagagctcaatagacgggctgatggtagagtagaggggcagtgagtcagaaggccatgtgtttcttcaaaataagacccattgatcagcatcccctgggaactcaccccagaccgcctgagttagattgtgcctttaacactactcccgggtgaagtgtatgcacagtaaagtctgagaagcagtgatatggttctcagccttgactgcatactggagggatctgggagctttaaaaagtacttacactttggtccttactgtcagagagcttctgagtaagtagcttggggtatgaaactgtaaacgttcccctggtcattttaacgtgcagccaagtttgagaaccactgacttagactcttagaaaagggatagggatgcaaaatgtaaaaattacaggatgtggggcacagaattagaagaatcaacatatataggacagaagtcctacctggagagacaaaagaaaaaggagaagagggaatactttctgcaaaaaaaaaaaatgactgaaaatttccaagaataaaggaaatgttcaagaccgtatgatgatatattgaaagaactcatagagtgccaataaggaaagatttttaaaaattcacacagaaaaatataggctgagtgtggtggctcacgtctataatcccagcactctgggaggccaaggtgggaggatcgcttgaagccaagagtttaagaaatattacattgatatttgggaatattaaggacaaagagaaacctttaaaacttcagagtgaagaggtagataccaagacaggaaaaagaactaaatgacagatgtctcaacagccacacccaaatgtcattttggtcttttcatatatttaaagtagtgaagagaaaaaaaaattaactcagcatttcttatccagttaaactatcatttaaaaatgagggtggaatatccacagtggtacaaggcctcagagggtttgccataaaagaccacctctgaaccacctgtgtcagtccgggtccatgggtgaaacagagctggaagctcaagtgctgcagtggggaaatggaggagaaagatcaggcaggggcggcaggggagcagctcacagactgttccttcggcccaggctccaatatggctcagcacagtgctgttgctgatgccggctttatttaaatatgtgagatttgattcattatggattttgcattaattttgatttttcaatattatttgtctttgattgctcagttttttgatacccccttaaattttgctcctgaggcaaatgccccacccacctgaccctctaggcctctacgatagggatatttgcaaaaaaaccacctcagttaatcaatgctccaacccaggcaccatccaggttcatggttcttctctggttgtgaaaattaaaaaccgggccaccacccacttctcagccttatccccagccagccagcagagcattgtagaatgtgagcttgcattgtgaacactctgaaaatgtaggccagagaaccttctggctggagatggctcctgctgcgagaagggaatatgacagatagcataagatattacagtaattttactgacaaagcactaagcatatcacaaaagaagttcaaaatcaattcatctgcttccaagcagaagcgagtctaacaggcagtgaagcatcatcttgataatgtagttgttccaaaagaagaaggaattaaccaggctaccctaaatgtgtctgtatgacatgcttttttgtttctgttaccctgataaggacttaaaattccatttgtatggaaataaactaagcttccgaagttatcttcctgttccggggagttatctcaggaggtttgctgcagaatttttctctgactaaatgggatcttaggctcagaggctgcaaggtttcagcttttgttgttaaatagtaaagcacactctacttccagccactacaactgtgcttctttaagggcggtatccattaaggttgtttgattacaaacaaagaaaactggctctaagcaacttgctatccttccaacaagttctttttctacttaatattaactaaagaatcagctgagcaggttaaaattagaatgggaaccgtgcagcgcattgggtggtagaaaatagttgacaactctctcagagtttattcattccaacaatagaacccgctgcaaccattcttttctgcattctctacaattttttcattttttttttagtatgatgttttgctatctagcattctcccctcaagactgaaagtcccaagaaaatgagtccaattgtccatgcttgagtcatatgcccatgctagggtgacaatctcaccaagatgttccttagtgagtgaggaaagtttgccaaagagacatggcagtgctgttccaagaaaagaaagagctgggtgctgggtgggcaaggaccacagaggaactaagaagagaggctatttctcctactgtcccatctccaaagaaaaggaggaagtaaaaaccgaaaaataacagactgattggcgccagtggccaggcctgtaggttaaagattaaaccccacccaaaccgcttgtgctatctatagatcacagacaacggtatgaagaaatacttgcattgctcaccacccccacctagtcacgtaccccatgcttgctggatctatcatgaccctttcacgtggaccccttagagtcgtaagcccttaaaagggccaggaactctttcttcggggagcttggttcttgagatgcaagtctgtcgacgctcccagcagaataaagcctcttccttctttaacctggtgtctgaagggttttgtctgtggcttgtcctgctacatttcttggtttcctgaccgggaagtgaggtgattaagggacagtggaggcagccccttaggcggcttagccttgccctgcggagcatccctgtggggtactccggccagcttgagcaatgtggatcctgagagtgctcctgggtaggcatttgccccagtggaatgcctcatcagagtggtgcatggcaggcccccacggaggatcaacacaggggctgaacactgggaaggaactggcacgtggagtccggacatctggaatatggtaggaccggtcccaggaacttacccaccccatttgagtggaagcatggcctgatcacccatggtgtgcccttattggcactttggtctcagttttgattttgatttggctcggcttgtttgaaaaaaaggaaagtgaaagtgagtgaatgcttgtttgggatgggcaacagatagacagtggttgccgtccgaagtgagtgttgagccctgagctgcagttccgtaggatacctcgtacagctaagtggcggttcgtgctggtgcctggtaccagcctgcctaagaggatctgagattcccgcaagggaagtggccagtgtcaggcgaggcaagtgagtgacccctttaccctttcccttcttgtgttgtgagcattgtttttgtctggcgggggtgagggtggtggagatgggtgagacgcaaagtaagcccactccattaggaactatgttaaagaatttcaaaaaaggttttaatggagattatggggttaatatgaccccaggaaaacttaggaccttgtgtgagatagattggccagcattagaagtgggttggccatcagaaggaagcctagacaggtcccttgtttcaaaggtatggcacaaggtaactggtaagccaggatacccagcccagtttccatacatagacacttggttacagctggttttaggccccccatggtggttaagaggacaggcagcagcagtactaatggcaaagggacagacagccaaggaagaatcctgctccacccgccaagggaagttggctcctaaagtcctgtccgacccaacatcagagaattcatggcaagaaatggtgccagtagcccccctctttcaccaagaaggaaggcctccccctcctgagtccactgagcctgagcttccacaagacctacgtacccctaggccacccagagtagaaaagaaaggatgcgagaccttgggagaaacccctcggttggcagcccgtttgaggtctagaactgggatacaaacgtccctgagagagcaatggtatactggggtagacaaggatgggcatatggtggaaaggcatgcctttgtgtaccaacccttcaacgctgccgatctcctcaattggaaaaacaataccccatcctatactgaaaaacctcaagctataattgatttgctccaaactattatccagacccacaacactacttgggctgattgccaccagttgctcatgtacctctttaacatggatgaaaggcgaagggtgctccaagcagcaactaagtggctagaggaacatgttccggctgattaccaaaaccccaagagtatgtgaggatccaattaccaggaacagatccccagtgggactcaaatgaaagacagggtatgcaaaggctaaactggtacagggaagcccttctggaagggttaaaaaaagggagctcaaaaaaagggagctcagaaggccacaaatgttaacaaagtctctgaggtcattcaaggaaaagatgagagtcctgcacaattttacgagagactatgtgaggcctattgtaggtgtactccctttgatcccgacagccctgaaaatcagcgcatgattagcatgactttagttagtcgaagtgcagaagacattagaagaaaactacagaaacaggctgggtttgcaggcatgaacacttcagttattggagatagccaaccaggtgttcgtgaatagagatgtggtaagctgcagagagaaccgcagagagagcgaacgccaagcctggtgaaataccaacctgctagccgcagctattagaggggtccccccaaaggggcgagagaagggggccccgggaaaaatacccagtctggccatccacgtttgcagtgtaaccagtgtgcttactataaggaaatagaatattggaaggacaagtgcccccagttgaaagggaaacaaggtggctctgagcaggaggcctcagacaaggatgaagggaccttgttcaatctggcaggagggttaccggactgagggggaccgggctcatgtgcccccaaagagcccatggtcaggatgacagtcgggggcaaggacattgggtttcttgtcgatactggtgctgaacactcagtagtaaccacccccgtcacccccttatccaaaaagactattgatataattggagccacagggatttcagcaaagaaacctttctgtttccctcggacctgcactgtggaggggcataaggtaattcaccagttcctgtacatgcctgactgccccttgcctttactgggaagggacctacttagcaagctgagagtcactatctcttttataaagcacagctctttacagctaaagttacctagaatgggagtcatcatggcccttatagttccttgggaggaggaatggagactcttcttatctgagccaggccaagagataggacaagctctggctaagcggtgacgaacagtgtgggtggaagataaccctccagggttggcaatcaaccaggcccccatactcatagaattaagtctggggcccagctggtcaggcaaaagcagtaccaggtccccagagaagcccttaagggcatacaggtccatctcaagtgcctgagggcctttggaattatagtcctttgtcagtctccatggaacactcccctcctacctgttcccaagccagggaccaaggactacaggccagtacaggatttgcgcatggtcaaccaagttacagtgactttgcatccaatggtacctaacccgtacacattgttggggttgctgccagctgaggacagctggttcacctgcttggacctaaaagatgctttctttagcatcacactagcccctcagagccaaaaactgtttgcctttcagtgggaggatccagggtcaggcgtcaccactctgtacactgggacccagctcccccaagggttcaagaactcccccaccatcttcggggaggcactggcttgagacttccagaagtttcctgccagagacctaggcagtcaggtgcaccaagggaatggataccctgtttcggcacctggaggactgtgggtataaggtgtccaagaagaaagctcagatctgcagacagcaggtacgttacctgggatttactacccaacagggagagcgcagcctgggatcacaaagaaagcaagtcatctgcaacctgctggagcctaagaccagaaggcaggtgagagaattcttaggagctgtagggttctgcagctcctaagagctgtggatcccaaagtttgtggatctcaaattttgcagtattggctaatcccctgtacggactcacaaagagaggagataaggaaactttcaaatgggggtcccaacagcaacgagcttttcatgagttaaaagagaaactcatgtcagccccagccctggggctacctgacctaacaaaaactttcacactgtatgtgtcagaaagaaaaaatgacagttggagttttaacccagatggtggggccctggccaagaccggtagcctacctctccaaacagctagatggagtttctaagggttggcccccatgcttaagagccttggcagcaactgtcctgctaggacaagaggcagataagctaactcttgggcaaaacctaaacataaaggcccccccatgctgtggtaacactaatgaacaccaaaggtcatcattggctaacaaatgccagactgactaggtaccaaagcttgctctgtgagaatctctgcataaccattgaagtttgcaacaccctgaaccccgccaccttgctcccagtgtcagagagcccagttgaacataactgtgtagaggtgttggactcagtttattctagcaggcccgacttccgagaccatccttggatgtcactagactgggagctgtacgtggacgggagcaactttgtcaactcacaaggagagaggtgtgtgggatatgcagtggtaaccctggatgctgtcattgaagccaaatcgttgccccagggcacttcagcccagaaggccgaactcattgctttaattcgggcctcagagctaagtgaaggtaagactgtaaacatttacactgactctcagtatgcctttttaactctccaagtgcatggggcattatacaaggaaaaaggcctattgaactctgggggaaaagacgtaaaatattagcaagggatcctgcaattattagaggcagtttggaagccccaaaaggtggcagtcatgcactgcagaggacgccagtgagcttccaccttgatcaccttggggaactcctgagctgactcaggggctcaaaaagcagcatccaccccctcccgggcatcagtcacagcccccctgctccctcaggcacctgaccttgtacctacttactctaaagaagagaaggactttctccaggcagagggagggcaggtgatagaagagggatggatccggttatcagacggaagaatagctgtgccacaactgctaggagccgcagttgtactggctgtgcatgagaccacccacctaggccaagagtcacttgaaaagttgttaggccagtacttctacatcttgcatctgtcagccctggccaaaacagtggtgtagcagtgtcacctgccggcagcacaatgctaggcaaggtccaactgtcccacccggcatacaagtttatggagcagcccccctttgaagatctccaagtaaacttcaccaagatgcccaaatgtggaggtaacaagtatttgctagttctaatgtgtacatactctgggtaggtggaggcctatccaacatggaccaagaaagctcgtgaagtaacccgtgtgcttctccgagatctcatccctaggtttggactgcccttacaaatcggctcagacaaccggctggcgtttgtggctgacttggtacagaagagagcaaaggtattgggatcacatggaaactacatactacctactgaccacaaagttctggaaacgtggagtggatgaatcagactatcaaaaatagtttaggtaaagtgtgtcaagaaacaggattaaagtgggtacaaggtctccctatggtattaagattagatgtaccccttctaaaagaacaggatattccccttatgaaatattataccataggccccctcccatactacagggactccgaggcactcctcgagggctaggtgaaattgagttacagagatagctacaggctttaggaaaaattacacaaacaatttcagcctgggtaaatgagaagtgccctgttagcttattcttcccagtttaccctttctctccaggtgatcgggtgtggatcaaggattggaacgtagcccccttgcggccatggtggaaaagaccccagaccatcatcttgaccactcctacagttgtaaaggtagagggaatcccagcctggatccaccacagccatgtaaaacctgcagcacctgagacctgggaagcaagaccaagcccagacaacccttgcaaagtgactctgaagaagacgacaaacccttctccagtcacacccggaagctgactggtccacgcatggccaaagcataaggaaactcaccatgagactcattttccttaaattttgaacttgtacagtaaggacttcaactgaccttcctcagactgaggactgtacccagtgtatacatcaagtcactgaggtaggacaaaaggttgttgcagtcctattattttatagttgttatgagtgtaccgggactctaaaaggaacttgtttgtataatgctactctatacaaggtatgtagcccaggaagttaccagcctgatgtgtgttataacccatctgagccccctatgactaccgtttttgaaataagattgaggactggcagctggggaaaagctgatatgagtaaataactggaacagaagagaaaggagccccaaaaaaattatcttaaaatttgatgcctgtgcagcaatcaacagtgacctgtatggaaataggataagatgtggctctctagattgggaaaggggctatatagtagaaaataagtatgtttgtcatgacttaggaatgtgtagtgatgaatgtagttactggtcctgtgtcatttaggccacctggaaaaaaagataagagggaccctgtccaccttcaaaaaggaaagagtaactcttcctgcactagtggtcattgtaacccattagaactactaattaccaatctccttgatccctgttggaaaacaggagagtacgtaactctaggaattgagggaactggactggatctccgagtaaatattttaatccaaggggaggtccacaggtgctttcccaaaccagtgtttcagaccttttacgatgaattgaatctgccagcaccagagcttccacacacacacacacacacacacacacacacacacacacacacacaaagacaaagaacttgtttctccagttattaggaaatgtagctcattccctcaatgttacttcctgttatgtatgtgggggaaccactatgggagaccaatggccttgggaagcccgggaattggtgcctactgatccagttcctgacataattccagtccagaaggcccaaattagcaacttctgggtcctgaaaaccttgattattggataatactgcatagctagagaaggaaaagacttcaccatccttgtaggaaggctcaattgtctaggacagaagctgtataacagcacaacagggacagtcacctggtggggtctaaaccatactgaaaagaatcccttcagtaaaattcctaaattacagactgcttaggtccatccagaatctcatcgagaccggacggctccctctggactatactggatatgtagacacagagcctacactccgtcacctgatcaatggggaagtagttgtgtcattggcaccattaagccatcccttttcctattgcccgtaaaaacaggtgagctcctaggtttccctgtctatgcctgagaaaagaggagcatatctataggaaattggaaagatgatgagtggccccccaaaaggatcatacagtactataggcctgccacacgagcacaagacggctcgtggggataccgaacccccatctacatgctcaaccagatcatacggttacaggccatattagaaataatcgctaatgaaactggcagagctttgactcttttagtccagcaggaaacccaaatgagaaatgccatctatcagaatagattggccttagactatttgctggcaactgaaggaggagtctgtggaaaattcaacttgaccaattgctgtctacaaatagatgatcaaggacaagtagttgaaaatatagagacatgacaaagccagcacatgtgcccatgcagatttggcataggtttgatcctggatctttgtttggaaaatggtttccagctctaggaggatttaaaactcttgtaataggcataataatagtgttaggacctgcatgttactcccctgtatgttacacatatttctccagttactaagaggcttcgttaccatcttagttcatcaaaacacctcagcacaagtatacatgaatcactattaatctgtctcacaggaagatctagatagtgaggatgagaatgagaactcccactagtgagtgaggttctcaaagggggaaatgaggagagaggctatttctcctactgtcctgtctccaaagaaaaggagaaagtaaaaactgaaaaataacagactgattggcgccactggccaggcctgtaggttaaagattaacccccaccccaaccgcttgtgctatccatagatcacagacaatggtatgaagaaatacttgccttcctcaccacccctacctagtcatgcagacaatggtatggagaaatacttgccttggtcaccaccccatctagtcgcgtaccccatgcttgctcaatctatcacaactttttcacgtggaccccttagagttgtaagcccttaaaagggccaggaaccctttcttcagggagctcggttcttgagatacaaatctgccaatgctcccagccgaataaagcctcttccttctttaacccggtgtctgaagggttttgtctgtggctcgtcctgctacagaaccaattcttctcaagtcagatccacacttttatgaacactgaagttctgaagtttcccaacaacaaaatgtttggaaaatgcactttgtacagtgtctgatacaacacgcaaaatcttatcatcttcaccatcatcagctaatgttattacttagaaaatctggccgagtattaataaaggtggggtgtttactgtgggaaagtgaaggctgtcttgaaatggcttttttctcaatagaagaaataaaaaagggtggctgagagtggtggctcatgcctgtaatcccagtactttgggaagccaaagagggtggaccccttgagctcaggggttcaagatcagcctggacaacatggcgaaaccccatctttacaaaaaaatacacaaattagcttggtgtggtggcttgtgcccatagtcccagctactcatggggctgaagtgggaggaatgcttgagcccaggaggggatcaagaggttgcagtaagccaagattgtgccactccactccaccctgggcaacacatttagactcagtctaaaaaaaaaaagaaaagaaaagaaagaaagaaaatacaaaagcgatgaaactggttattgttggtatccgcttctagagagccctggattcctgctgcagcctgtgggtcactgccccgccacacaaaggaccatgtatccattaggcaagatgggcacacacttaggggcacacaagattttttaaattagaagaaaaaaaatgaatgtttaaattgaagaaaatgcataatggtatatatttgtctttataccaaagcagttgcaaaatttaaccacaaaagtcataatgtagccccaagtcaccccccacccaccgtggaatttgtatgctctgtacaggagagcaagggctaactttactcccattcctgaccaatgatcttcctccagctcacatgggaccttgctgaatcatccccagtgcttttctctgaagtgggatctaaagttgttcacaaattctgcattcttttcttttctaaaaactctacttctgtgacagactacaaatcctgcactctttattcaataaatattaatttagtatttagtattacacatgcagacgctctgcaaaatactgggacaaaattggccaagacaggcttagtttttgtgcttatggagattaaagtcaaattgtagaaacatgtaatcaatgtgcttatcttactgggctgtaattacttagtaagtagaggaatatatatctatgtctaagattttctacatttacactgatcatagcatatataacctaccccctgaacttgacatttgcacacacacacacaaacacacagagttcagacaaatatgttgtctcttcttctgtaacttttcccccaaatgcctatcctaactacccccatgaagtcccctgataaaaacccttattcaaacaagtccagaagacagaattctcattgggacccccaagaacagaggaaagaatagatgaatggatggtgttaaattaatatgttaagaccctaccccccagatggatggtattaagacagtgggtctttaggaattaattaggtcatgagggtgaaactttcatgatgaggtagtgccctataagaagagacatgcaacagcttcctctccacaatgtaagaaaacctggaccctgctggcacactaatcttggacttctcagactccagaactgtgaaatgtttgtttaagccacccaatctataaggtacttttgttacagccgcccaaacaaactgagacaaatggatggatggatggatggatgaataatagactgaatagaggaataagaggtggacgggtggagggaagaaataacaaggatgaaagaagatgaacagagagatcgaggagtggatgcctagataaatacatacataaaagaataaaaagaagatagaaaatgaaagaaaaaaatgaataactagaaagatggataaattaatatacatatagaactttgacagtagggataaataaatgggtagaatcccagcactttgggaggccgagacgggcagatcacgaggtcaggagatcgagaccatcctggctaacatggtgaaaccccatctctactaaaaatgcaaaaaattagccaggcgtagtggcgggcgcctgtagccccagctacttgggaggctgaggcaggagaatggcgtgaacctgggaggcagagcttgcagtgagccgagactgcaccactgcactccagcctgggcgacagagccagactccatctcaaaaataaataaataaataagtaaaaaaatgggtagatggaaggagaaagcaagaactgatttggggaaaaagggaatgaagggatgtgtgaatatatatattatttaaaaaattatagagaattcagtaagcatgaacataagggtgaaatgagtaaatggatgaatagatggacaattagataaatgaacatagtgatgggctactaaatgggcagatggaagaatcaagtaatgcggtaagaagggatagatgtagggaaagtcgagctgatatttggaagggcagatatatagatgaataggagggtgatgcaagatagatacactgatgactgaatggataaatgaacacacaaataatgggtggccaaagtaacacggtagaaatagacggagtttcatttggtcaggtacagggaatggtagatttgtgggtacatgaatttatgagtggattgcatgaataactggatgagtggatagatcaatggatgatgaattggtgaatgaagattcaataaacaggtgggcatatgagcatatatgagaagatactgtatttaatgtgatatactagaatgtggaacacaaagtgttatgttatagcttggcctaatcctgctttcaactctttggggtctgactgcctcagaaaacatctgaggtaattagctctgtaaaaccttgaaagcagatgttcatttggactgcagtgacacaggaagattttatagggagggtggcatattcaccaaagtgaagaaaacatggggctgaagggagctgagggccccatcttttcctcctcaggatgaagaagtcctcacctcctatttctctgagacaatttgtctggcagagattatcactgacaaattgtttgttgttaattaaataacaaaacaggtggggtgggaagatattctgcaagttctcagatattccctttttggttgtggcacatatgtatgtattcatccagttagattcctgtttagaagggcctgctctgtgccaggtcctgggcatgtccccatgtggatgacaggaaagagtaagacaatcactgcactgcactgagtcccagagcctctacacctagcagccacatgaccctgggcatgctccctatctcatgtcattgtcatagcaaccccatgaagtaagtactacgaccatccagtttcaaagacgagaaacctcaggcacaatgggattggaacacataaaacactccctgtataacaggcgctgttttaagtgtccaaaaacattagatttttttgttacttgctgtaggttacaaaattcgtcccaatcccccactctctccctgactttgtgattttgtaatgtcactgcagcaattcccatcaagagatggcatctatctccttaattcttgaatcagatctgactttagccaacagaatgtgggagatgtgatgttgtgccaattccaaacctaagcctcaagggacactgagggtttttctgtctcttggaccctgatgttgccatgtgaaaaaattcaagctagctcctagaggatgaaaggttttatggatgagaactctggacaaccagtgacaaatagctaacttccagacctgggagtgaaagccttctagaccagtcagtccccagatgaccctcaactgactacaacatgtaagtgagcccatctgagatcagctaagctttgcccagataagcagaactgcccaactgctctccagactcgtgagctagactcatggctgttgttttaagccactgagtttggagtgatttgggagacatgacaggaacctataaaggccacataagtttgaaagagagataaacttaaaatgaccaagatacgaatatatgggagcacaaaaaaaggaaggaattctcctccacaagggaatcagtgaggttcctggagagggtgaagttgggatcaagccttgagaaaagtagagtcaagtttctgccaggagtgtctgcagggaaacctaagcgccaaaaacccacccaagagcctcagacaaataggtgagtcgggctttctcccagccaccagaatcaagacttgtgtaggcaacaagctggtcaggacaagcagcacaacatctctacttcggggccagactgctggacatcaagctacaatctaaaacacccagccaggggctacgccctccatctccctgcttctctcacccctgcactcaccaaatcccttatcctcccatactcccatcagcattcataacagctcctgtcaagagccatgcgctccagactcagggaaatgctcaaagccatgttcagtatcaaaatgagacagaagaaattatgtttaattcaacaaggaagcaactggctttggagatgagatgcggtgggcaagaagacgggggtagctgccagctgcagttaccacaaacaggtgctctgtgtgcagtatataccatacaccagccacggggctactgactctctgggaaggaacacacagccagctactgaatgggcagctgcagagggagctaggcatgatatctaaactggctttgatcaaaaagatatacatactcatagtttaagaatcaagtacacttacaagacttgctacaaaaatagcagccttctgcctctctctattcctcccaccctcaactcccagagacaaccacttgcaacgtttagctgattcatctgatattaccttgatatctctgaaatataaaaaaggaccaatatagtgtgcttttagttttaggtatcatctctgatcttccataattggaacattcttctttcacagctcccctgcccccaccataccttactttccttcctgccagctttccaacgtgagtcttcttgaaagaatctctccagaccattcgacttgctccagtctggaccaatcaccctcatatctggtgcacagctgttgccctggggtctcccttcattctctacctgagaatttccttcacaactctcttcagttagatatcctgcatttccattctctgtttttcacactcccctgatttaaaccctacttttggtggagcacatctcctaataatttgatatcaaagagtacatgagactttaatgtctaagaaagccattattcagtccttacatttgcttgatagcttggctggatgaagatttctaggctgaaaagtatcgtccttccaatcttccaaggcattaaaccaacactgtcttctagcttccagtattgctgctgaaatgtttcaagccattctgtttcctgatcctttgtatatgacacatctttttttccttcctggaagcttctagtatcttccctttgtccttcgtataataaaattttatcatacaacaaaaaagctataaaaagaaacattcagagaacaagaaagtattgaacattaaaaattgtagaacatgaataaaaattcctaccgaagtgttggatgacaaatatttaaaaatctacaataaaggtcaggcacagtggctcacacctgtaaatcccagcactttgggagactgaggcaggtggatcgcctgagatcaggagttcaagaccaacctgaccaacaaggtgaaaccccgtctctactaaaaatacaaaaattagttgggcatggtagtaggtgcctgtgatcccagctactcgggaggctgagaatagcttgaactagggaggcagaagttggagtgagccaagatcgcaccatcgcactccaggctgggcaacagagcaagactccatctcaaaaacaacaacaacaacaataacaaaacaataaaacagagaggaaaggcaatctgaggacacttctggttgtgctgacttctttcatgtaacaggctttcctcagctgtctggagatcctgagctgtctgtgtaatttaaggtcaggacactaacacactgattggaggctcaatcgcttgatgagatctatcaactatgggctttaccagagaggagtcatggggcattcccttaaagaacctccaatatcagtatctctggggaaacccaccaaaaagagagacctaaaaatttctctaaacccctgcctatagagtacaggcctggcagtcagcatcctggaagctgagtgtgagaagaaaaccaggggtcattcaatatagaaatgtttatataaccccattttcagtacagcatccctgctgtctttcatgcctagtgtttcatcctctctgagaaaatatactttctgctttttcaagcctcatctttacctccacttccagaagtacctggaagtgccaatttccgagcctttagtggttcttcagtgtaaatcaggttgcttctcagcagaccagagaaagctgactcctaagccagagtggggagaagcaatcagttcccacttgtccatgtgcttttcaactccccaaatttccacgtttttgtttcctctccctttttatgagtttacacatatctatattttaaatcttcttactttctgtttacgctcagaactgcactaatatgctagttgatgtatacattcaatgtttacgctcagaactgcactaatatgctagttgatgtacacattcaatcagccatctatacctagaacctaagctggctttcaaccaccaaagaaatccatacttcccttttagtttcctaagaccaaccaaatacccttcctatggaaccataaaagagagaaaagttcccacaatatctcactctgggccgtagtagatgataatagctattgtttgggactgcccagctccattccctttctgtggttgggcatataatccacaaataatcaatcatagcatctcattacccagggcagtgattggctcaggagtggacatatgattcaaccaagaccaatcaacatcctttcctgggacaaatatacagatgttgggaagagcaactgcaatataaaaagagtttctaagatgaaaagttgttaatttggggctgccaggggctatcttttcaacacatagaaaacgtctatctataatgaggaaaaaataaagccaagcagagatgtgtgagagagaaagtgcgtccaaaagagaggcaaagagaatgctgatggcatgcaaagagcaaaaacagaaagagaaggggatctggaataagatgaaaagaattttgtagcatggacatggagactggaaacagattttttagaatgggaaacaggggaagaagcacaaaactaacaacatgaaaatagatgaaagtataaaactcactgtaaaggtaaaaatgtagtcaaattcagaatactctaacactgcaatggtggtggatacataatttttaactctagtgtaaaaatttaaacacaaaagtattaaaataactatagctacaataatttgtcaatgggtatgtgacatataaaggtgtaaattgtgacattaatataaaatattgggggaagagaagttaaaagtacaaagcttttgtatgaaatgaaagttaaattgttatcagcttaaaacataatgtcttaactataatatgatttaggtaagccttgtggtaaacacacacacacacacacacacacacacacacacaaaaatctgacatagatacacaaaagataaagagaagggattgcccctacaaaaagtcatatcacataggaagacagcgagagagaaagaatggaacaaaggaagtacaaaatagtaaaaaaaaaaaaaaaaaaaaaaaaaaaaaatggcaatattaaaatcttacccatcaaaaattagtttatatgtaaatggattaagttctctgatataaaaatacagagtggctgaatgaattgaaaaacaagattcagataaattctgcttaaaagagacagtttagctttaaggactcaaagacctgacttaggctttcagtccatgcctgaaagggatagaaaaatatatttgatgaaaatgatagtcatgaagtccttgcccatgcctatggcctcaatggtattgcctaggttttcttctagggtttttatggtttttaggtctgacatttaagtctttaatccatcttgaattaatttttgtataaggtgtaaggaagggatccagtttcagctttctacatatggctagccagttttcccagcatcatttattaaatagggaatcctttccccattcttgtttttgtgaggtttgtcaaagatcagatggttgtagatgtgtggtgttatttctgagggctctgttctgttccattggtttatatctctgttttggtaccagtaccatgctgctttggttactatagtatagtttgaagtcaggtagcgtggtgcctccagctttgttctttttgcttaggactgtcttggcaatgagggctcttttttggttccatctgaactttaaagtagttttttccaattctgtgaagaaagtcattggtagcctgatggggatggcattgaatctataaattaccttgggcagtatggccattttcacgacactgattcttcctacccatgagcataaaatgttcttccatttgtttgtgtcctcctttatttcgttgagcagtggtttgcagttctccttgaagaggtccttcacatcccttgtaagttggattcctaggtattttattctctttgtagcaactgtgaatgggagttcactcatgatctggctctctgtttgtctgttattggtgtataggaatgcttgtgattcctgcacattgattttgtatcctgagactttgctgaagttgcttatcagcttaaggagatttggggctgagacaatggggttttctaaatatacaatcatgtcatctgcaaacagagacaatttgccttcctcacttcctaactgaataccctttatttctttctcttgcctgattgccctggccagaacttccaacactatgttgaacaggagtggtgcgagagggcatccttgtcttgtgccggttttcaaagggaatgcttccagtttttgcccattcagtatgatattggctatgggtctgtcataaatagctcttactattttgagatacgttccatcaatacctagtttattgagtttttagcatgaaggctgttgaattttgtcaaaggccttttctgtgtctactgagataatcatgtggtttttgtcattggttctgcttctgtgatggattacatttattgatttgcatatgttgaaccagccttgcatcccaatgataaagctgacttaatcgtgtggataagctttttgatgtgcttctagattcggtttgtcaatattttattgaggattttcacatggatgttcatcagggatattggtctaaaattctctttttttgttgtgtctctgccaggctttcgtatcaggatgatgctggcctcataaaatgagttagggaggattccctctttttctattgattggaatagtttcagaaggaatggtaccagctcctctctgtacctctggtaaaatttggctgtgaatctatctggtcctggacttttcttggttggtaggctattgagtattgcctcaatttcagagcctgttattggtctattcagagattcaacttcttcctggtttagtcttgggaaggtgtaggtgtccaggaatttattcatttcttctggattttctaatttatttgcatagaggtgtttatagtatcctctgatggtagtttgtatttctgtgggatcggtggtgatatcctctttaccattttttattgcatctatttgattcttctctcttttcttctttattagtctcactagcggtctatcaactttgctgatcttttcaaaaaaccagctcctggattcattgattcattcaaagatttaaagtgtcgactttaaatctttcctgctttctcttgtgggcatttagtgctataaatttccctctacgcactgctttaaatgtgtccctgagattctgctacgttgtgtctttgttctcattagtttcaaagaacatctttatttctgccttcatttagttatttagccagtaatcattcaggagcaggttgttcagtttccatgtagttgtgcggttttgagtgagtttcttaatcctgagttctaatttgattgcactgtggtatgagagacagtttgttgtgatttctgttcttttacatttgctgaggagtgctttacttccaactatgtggtcaattttggaataagtgtgatgtggtgctcagaagaacgtatactgtgttgattttgggtggagagatctgtagatgtctattagatccgcttggtgcaaggacttcatgactaaaacaccaaaagcaatggcaacaaaagccaaaatagacaaatgggacctaattaaactaaagagcttctgtacagcaaaagaaactaccatcagagtgaacaggaacatacagaatgggagaaaatttttgcaatctatccatctgacaaagggctaatatccagaatctacaaagaagttaaacaaatttacaagaaaaaaaaactgcatcaaaaagtgggcaaaggatatgaacagacacttctcaaaagaagacatttatgcagccaacagacacatgaaaaaatgctcatcatcactagtcatcagagaaatgcagatcaaacccacaatgagataccatctcacaccagttagaatggtgatcattaaaaagtcaggaaacaacagatgctggagaggaattggagaaataggaacgcttttacactgttggtgggagtataaactagttcaaccattgtggaagacagtgtgacgattcctcaaggatctagaactagaaataccatttgacccagccatcccattaccgggtatatacccaaaggattataaatcatgctaatataaagacacatgcacacatatgtttattgtggcactatgcacaatagcaaagactggaaaccaacccaaatgtccaccaatgatagactggattaagaaaatatggcacatatacaccatggaatactatgtagccataaaaaaggatgagttcatgtcctttgcagggacatagatgaatctggaaaccatcattctgagcaaactatcacaaggacagaaaaccaaacactgcatgttctcactcataggtgggaactgaacaatgagaacacttggacacagagcggggaacatcacacactagggcctgtcctagggtagaagagtaggggaggaatagcattaggagaaatacctaatgtaaataatgatttaatgtgtgcagcaaaccaacatggcacatgtatacctatgtaacaaacctgcacattgtgcacatgtaccctagaacttaaagtataattaaaaaaaaaaagaaaatgataaacaaaaaagagccagggtggctatttttatatcagacaaaatagactttaagtaaaagaaaatgtcacaagagacagagaaggtcattatataatgataaagtggttaattcatcaagaggatatatgaattgcaaatatatatgcatattgggtgcacattggagcacctattaaataaaccaaatattaatggttatagagggagaaatagacaacaatacagtaatagtagaggattcccattttctttctttcttcctttttttttttttttttgagagagtcttgctctctcaaggtgggagtgcagtggtatcatttcagcttactgcaacctctgtgttccaggttcaaaggattctcatgcttcagcctcccaaggagctgggattacaggcatgcaccacaaggcccagctaatttttgtatttttagtagagacagggtttctctatgttggccaggctggtctcgaactcctggcctcaagtaatccatctgcctcggcctcccaaagtgctgggattacaggcgtgagccactgcaccaagccagtactcccactttcaacaatttatagataatccagacagaaaataaataagggaacagtggacttggggggctaatgggcctaacagacatatacagaacactccacccaacagcagaaaaatagaaattctttttaagtgcacatgaaaaaacatccaggacaaatcatatgttaggctacaaaacaagttttaacatattagaaaagactgaaatcatatcgattttcttttccaacaaaatggtataaaactggaactcaagaacagggggacagttggaaaattcacaaatatgtaggaattaaacaacacacatctaaacaatcaacaggtcaaagaagatgtcaaaagggaaaacaaaaaaaatcttgagatgaatgaaaatgaaaaaatagcatatcaaaactatatggcatgcagctaaaacagttctaagaggacaatttatagtgaccaacacctacataaagagaaaacatctcaaataagcaacctaactttacactttaaggaattagaaaaaaaagagcaaactaaggcccaggtcagcagaaagaaggaattaaaaatcaaaacagaaacaaataaatgaaaataaagactaggaaaataatagaaaacattaaggaaattaagacgtgtgtgtgtgtgtttttaagagataagcagaattgagaaaccattagatagactaagtaaaaaaagaaaactttcagataaaaaaatccttaaaattaataaaattataaatgaaagaggaaacattacaactgatatgacagaaatataaaagatttctagagatactatgaacaattatatgtcaacaaattggatagcctagagaaacagataaattcctaaaaacatacaacctaccaagactgaatcatgaaaaaacagaaaatccaaacagaccaataatgagtaaggaaattaatcagtaatcaaaaatctcccaataaagacaagcccagtaactgacggttttactggtgcactctaccaaacatttaaggaagaattaacaccagtccttatcaaatttttatctgaaaaactgaataggaggaagcacttccaaattcactttattaggccagcattaccctgatattaaagccagacattataagaagactactaatcaatatccctaatgaacataggtgtaaaaatcttccacaaaataccagcaaactgaatttaccagtacattaaaaggatcatacattatgattgagcaggatttattctttgaatgaaaggatgattcaacattcaacatacacaaatcaataaatgggaacccacattagcagaatagaggatataaaacatatgattatcggccgggcgcggtggctcacgcctgtaatcccagcactttgggaggccgaggcgggcggatcacgaggtcaggagatcgagaccatcccggctaaaatggtgaaaccccgtctctactaaaaatacaaaaaattagccgggcgtagtggcgggcgcctgtagtcccagctacttgggaggctgaggcaggagaatggcgtgaacccgggaggcggagcttgcagtgagccgagatcccgccactgcactccagcctgggcgacagagcgagactccgtctgaaaaaaaaaaaaaaaaaaaaaaaaaaaaaaaaacatatgattatcacaacagatgctagaaaaaaaactgacaaaattcaacatcatttcatgataaaaactctcaacaagtaacaaccatatacgacaaacccacagctaacatgacactcaactgtgaaaagtggaaagcttttcatctaagatcaggaacaagacagggtgcccatttgtatcacttccattcaatctaatactggaaatactactaagagcaattaggtaagaaaaagaaataaatggcatccaaagaggagagaagaaagaaattgtttatgtttgctgatgatatgatcttgtatatagaaaaccctaaacatgccaccaaaaaactgttaaaactaacaaattcagtgaagttgcaagatacaaaatctacatacaaaaatcagtagcaactatatatactaacaagaaagtacctaaaaacagaaataaacaattcaatttacaatagcatcaaaaataaaataataaatttaaccaaggaggtgaaaacactgacaaaaaattgaagatgatataagtaaatgaaaaaatatatttatgaattggaagaatcaatattgttaaaatggccacataatcaaaagtaatctacagtttgaatgcaattcctatcaaaattccaatgtcattcttcacagaaaaagtaaaaataatcttacaattggtatgaagccacaaaataacaccaaatagccaaagcaatcatgagtgagaagaaaaaagctggaagcttccatattgtttagaagttagaaatgaaacaaaacaaaaaacaaagttgaaggcatcacactacctgatctcaaaaatatattagaaagctacggtaattaaaacaacatggtactggcagaaaaacagaaacatagaacaatggaacagaatagacagtccagaaatatatccatatgtttacagccaatcttcaacaaaggtattaagaatacacaatggggaaaacatagtctcttcttcaataaatggtattggtaaaactgtatatcaatatggaaaagaataaaattggattataccatatacaataataaactcaaaataaattactcaaatataagacctggaaatgcaaaatgactagaacataggagaaaagcttcttgacattggtgtgggtaatgatattttggatatgacaccaaaagcacaggcagcagaaacaaaaatagacaaataggattatatcaagctaaaaagcttcttcacagcaaaggaaacagttaacagaagagacaacctacagaataggagaaaatatttgcaagccgaatatttgataaagggttaatttccaaaatatatgaagaactcaactcaatagcaaaaaacaaacaaaaaacaaccaaataactttattaaaaaacaggcaaagggaccagctgcagtggctcacatctgtaatcccagcactttaggagggcaaaacagcaggatctgttgagcccaggagtctgacaccagactgagcaaaatgatgagaaactgtcttttcaaaaaaagaaagaaaaaaatattagctgggtgtggtggagcacgactgtggtcccagcttctcaggaagctgaggtggaaggatcacttgagcctgggaggtcaagactgcagtgagccaggattgtgccactgcagtgcagcctggttgacagaacaagaccctgtctcacatatgtaaacacatggatatatgtctcaacataaaacaaacaaaaatcggcaaaggacccaatagacataaaaatggccaacaggtatatgaaaaaatgttcaacatcactagtcatcgggaaaatgaaaattaaaaccacagtgagacactacctcacacttgttagaatcgctattatcaaaaagacaaaaaattagtattggcgagaatgccgagaaaaaggaatccctgtactttgttggcagaaatgtaaattaatacagccactttgtaaaacagtagtgacattcctaaaaaaaataagaatagaactaccataggatccagttgtctcacttccaagtattgtgaaagttgattataaaaattgggtcattctactgaatgaaaacagagttgagaagccagagggggaaaacactcagggtacataacaccgctccaagaatataattatttgcaagcctggctgtgaaattgcctgtagtaacctgaagccagttttatctaatagctactgacacaacctgctgcaaatctaggactagttttaccatcaccaccactcaccaatcagagctttcttgctccccagaactttacaagtgccacgaactttcttgaaaaacaaatacataacatttctccttgttataaaacttccgaccttctctttgttctttggatacaccaaagaccacccagtctgtgtatatcttcccaattgcaatttttcctaaacaaaacatgttcatgtcagagattcatctctatagtttatttgacttcaacagtatatatcaaaaggaaatgaaattggtatgtcaataaaacatgtgcactctcatgttctttgcagcagtattcacaataatcatgatatggcatcaatctaagtgtccatcagtggatgagtggatagagcacatgtgagattgagatatatatatatatatacacacacacacacacacacacatatatatatacacacacatatatatacacacacacacatacatttatgtataatggaatactattcagcttttaaaaaaggataattctgtcacttgtgagaacatggatgaacctagaggaagttacgttaagtgagataagccaggcacagaaagacaactaccatgcgatttcactcaaatgaggaatcaaaaaagttgttgaggttttagttcaaaatggctgactagaagcagcaagcccatgcctctctcacagacaggaaccacaatggcaagtaaatcctcacacttcacatagatcatcttaagagagcatgctcggattcaccagagaaccaatgggacccaaggaaagcagggaacagtggagccaggcagcctgcggagctgggacggtgtggagtgaagagaggctcttactccaaggaaggggtgaatgaggtgagaggctccgggacccacctctccatcacagacttttacaatcctagccacaggagagcccccataatcctccttaggcctccagctgaacacagagccacccagaaactttgcagaggcaccgctcaagcccacctggaatcccacagtcagcctggtgccagctgccatgccaaggagggaggcgaggctctttgcacacccccaggagagacagcacagctgctgtgcagaggagctgccagaccacacaccacactactcccggcctcggctgcttcctgcgaaatggggcttacctgttgcaggccccctgtacagttgacccacccctgcagaaacactggccttggctaggtgtttctctgagaccccgactcccaggccagggagagagtgaggaggcctgggacctctgcatgaccccaagaacaaaatccagaactgcttctgcaggagcaaagtgtgagtaggtcatgtgccccccaggtgccaatctccagtgccctgaggggccctcccttcccccagtgaaaggccacctggctcctgcctgagcatttccgctgcaaccacagctcttctgagagcccagtccccacaggcctgtgctgccctcaggctcccaccacctgggccttctgtctgtcccctgcctgagggttctatcagcctctcagggaccagccagccccttccccatcacagccagctcctgaagtctagggtgccccaaccccagtccagccccttaacccatttatgcctgaggttgcaattttttaaatttttccaatcagaccttggcgatgatcttgagcagtgggatataaataagtcccacatgcttagtattccagtaatggaacactaggcataaatgggttttaaggacccatactctctgtccggtaggccgtctaagggcctgagaactggggcgctatgtagaccaatccaacagtgctggcacctaaccacttttcccagggcctgaggtcaggccagcccaaccagttgacaccaccacaactgatacccatccacaggggctgaaaggcagagtgtatcccctggccctgacaatgcaacatcattaccacatcaaaggaaagagagccatacgctgaaaaggttctgccccaaaaccactcctgtggagagtctcaagacaggtgtgttccacagctctcaacccactgtggcttggatgtagacaacagtgaggatctgaactgagagtcacgagttccaggactggtgtgattgggaatagatcactttcctgcctatctagcgcatggagctagtgcagccccttcacccgatgtagagacctcagcacatgtcactgggagctcccaaagccatctccacaaggcttggtgcctatacttggcattggagtatttgtgggcaagccagggggtccagctctgcccagctctacccactccctgctgaacagaaaactcagggcaccaggcacttcactgtccagcccatcaccagaagcaacagagagcacctcccagtaaacaaagaccaagtacctacccatctgctgtgccacaagctggctcttacccgtcagcgccatctactggcctgcaggttgaactgcacagccaaatataaagcctggccaatggaagtgcgtgggctatagaagcaaagctttagcaacacaacgtactccacagtcactccctagggaaagggagggatggagaaagaaaaaacaaataagaaaaaaaaaatcccatctgaacaaaaataaattcaaaaataagagtggttttctgtgagcagctgctccagatgagaaagaatcagcataagaattctggcatcatgaaaaaatctgaatgttgtgacatgactaaaggatcatattagctctctagaaatataccctaaccaaaatggaaactgagaactgacaaagagttcaaagtataaattgcaaggaaattaaatgagattgaagacaaggttgaaaaccaacacaagaaactataaaaacaatccaggaaatgatgggaaagataaatatattttaaaaaatgcaaaaggacttcttgaaataaaaagcctacttaagacatttgaaaatatagttgaaagctttaacaatggattacaccagcagaagaaagaatttcagagcttgaagactgatcattgaaactaatttgtcaaaagtaaaaataattttgaaaaccaaagccagagaaaccatatttctctggtgagaaatatgaattatctaaagcaataaaacctatgacttattagcattcctgaaagagaaaaagtaagccactggaaaacatatttgaaaataactcaagaaaattttcttaattttgctggagagttgaacatccagatacaaaaaattcagagaacatctgtgggattctatacaagatgaacatcaccaaggcatatggtcttcagactatgctaagtgaatgctgaagaaataaaaaatattaaaggcagctacagcaaaaactcaaatcacctagaaaggaaaattgatcaaacactggacttctcagcagaaaccctagaagcaagaatagattggaggcctatttttagcctctttaaataaatgcaaaccaagaattttacattctgccatactaagcttcataaatgaagaagaaataaagtcttccccagacaagcaaacactaagagaatttgtcaccactagacagatcctacaatacatgctcaaaggcgttctaaatatggaaatgaaagtactatactcaccatcagaaaaagataccaaagtacaaagctcacagatcctataaagcaattacacaattgaaactccaaaacaactagttaataacacaatgacaggagcaaaacctcacatatcaacattaactttcaatgtaaatgacctaaattgtacacttaaaagatacagagtggcaaattgggttataaaaaaaataagatgcaaccatctgctgtctaaaaaagacccacctactggctaaagacacattcagactcaaagtaaaagggtagaaaatgagatcatgcaaatatcatgcaaacagacactagaaactcttaaaaggaaggagggtggaaggggagtgaggactaaaatattacctgttggatacggtgttcaatatttgggtgatggaaacactagaagcccaatttctatcattatgcaggcaatacccttgtaacaaacaagcacatataccaccagtgtcaaaaattaaaatttttttaaatgaaataaaatttcaaactcacaaaagcaaagaatggtgtttgccaggtactggggatgggggagcaaaatgagatgttgctcaaagtaaacaaagtttggtagacagcatgagtaagttctgcagatctattgcaccgaatgtacaataataatgtatacttggaaactgctaagagaatagatcttaaatgttctcactgcaaaaaatgtgctagcttgatttaatattttcacaatgtatactgtatcaaaacatcacattgtacactgtaaagatatataattttatttgtcaattataccttaataaaattggcagggagggatgggtgcaagaaataaaggatatgagcaagaaatgaaaggcatctgtgctgggctcgacttttccaatgtattcacttgacacatcggtgacagtctcatgttctgacttttctgacactgtagtctggaaaaaactatcccctatatgcaacacagccattaaaacacacacacagacacacatacacacacacacacacgcagaggaacttaatacagtaatattcaatatcaccaactttgcctgttaccatggtaaccagcagcattaagtcctgctgctaaaatttcaagagcagatgacatgaactatttatgtataattgcattttataaagagaaagaacttgtctttcatataaaatatgactcagtctcagatgagatgggtgattatatcacattgccgtcagaacaaatgtagcaagtcccttgtctccacgccctctaccccagtgcatgttacttccatatgcaagtggaaagcaagatggcaaacaagggttagcctcccacagaaagtgcctgccctgatttgagctggcgtcactgcaaagacgctcagggttcaagtattcacttctccaaattgagttaaggggttctttttcatttctactcttacaagcttgtgcacctgctgtctgtcccctgtggttggcttgtcttgagccacagccacttgtataagtcatcagcatggagtggacatagaccaggtcaaaagccttcatcttgtagatagagattgagaggggtcataactagatgtttctggagacagggttgtgctcagtagtggcatccattcgccagcaatagcacaggcctaaactagttcagcattggatcatgttgatttttccctcatccggggattttctgcagacattctaatgtcaatttcgcagaccatcatccttcctgagccaagctatcaaggaacaaaaagagtaggtgttacctatgtggtgacagctcccacccttgagcactgagccttgttcctgagcattgcagcactgttcacagccaagtgaaccgtcttcaagaagccttcgtcactcatgtgttcaggaccaggaaaaaagcttattcaataactaagtaaggttatgtgattatctctttaatcatatctttaataagttttctgggaatggtagaggttttaaatgagaacgtattcaaccaaataacgttgagctccttaagggaagaaacaaattccatgttttattcaaggtgtgattccaattctgggtacagagacccccacaaaaacggctctgctctaatgtttgtgggatgggtgggaagatggacaacgcatggatgaaaattcccaaacaggaaaatatatcttgaatgaaagaatgaacgaaaatactggttttagaaaggagggacggatggagagattatcagggcagggaagatcccgaaggaaatgagcaggctttgctgaaagagtttcttgggcatgggaaagacccagatggggttggcctgccatttacccctctgcaggaaattcctccaggccacaccccaccttctctgattttctcagctgccgaaccttgattgagctgtgttccctgttacaatgccagaattgaaaaagagaaaacaaatgagaaaataaatcacgataatttcccctgccttaacaagacacttgcattcacgtactgtgtgcctaagaagggcagttaccagtgcagttctgtagtgaaaaggtttcttgagccagagaaagacccagaaatggatccttggtggccatctggacaaagcccttaatcagtcacctatgatgcccacttgctagtcctgcatccaggttcatgggaagtctgcagccatgacaggctctgcctggggttggccctccaccaaagagcctccggtccctgcctcttggggcacagacccctactgcccccagcctactgacctgccccaggcccctgcagtctttatcatcaccgcatcgtgcagtttgggtggcatctggttctaaaatgttcccaggcttctgccttgcttctcaggtgcaccagtcttttcacacatgggtgggcttctctgaagctgctgcagttactcccagtggccaaatcatttcttacttcccttaataaacaaggcaacagggttttgatgaaagagtttcttctttggagggcagaacagcttccttgccttgattaaaatgtttgccagctgtttctcattctggtctcaaggtggcttaaatcttcaggaaagtcagacacttcactcactggtaattatttttccttattaaaaatctatttgcctccatgtgaccaacatgctactctccatcatgatgttgagccattcccacctcttccatccatctccactccaatttggttttatcatctgatcccaccaggtaagagaaagcaattagccctctgcccttgaagtttgaccccgacaagattaatccggttcctcggagtgtctgaggacctggtgaaaacaagcagggccttttgtcaggtctctcctcacacctgtgaaggtctctgttcatgactatggggcatgacagcattcacagcacaaaacacttcatcaacattctaagtatacccttgcagctcaaaattgtcagcacttgaaggttttcctcttcagagatggtcttatcacaacagcactgtgtggtcattctcctgagtgctgctgccctgcagataggtccaaagcccaacttgcagagtcacttcttcacgttgcggcccaagatgcacaggacttctgaggtgctgaggttgaggaaagaccggatacaagaacacctcaagaattttgtacccagagggcagagcccagacataaatgttttaaaagaaagacgattttccatgatcttggaaatttctaggtcagactgctttcacacctattttggaaaaggggcctactccatccctgcatcaaccatagcaaagaaagtcaacaaagaccaaaaatatatctgaatgaatgggttttcattcattctttcaacaatttattggttgattactctgcatcaggcaaggttctagatgaaggcactagagcctctatttaatctgaatttatcttttcaatacatgagccaaattctgctgactgggaagcactaatgagacaattaaacagaagtctaatctagagtgactggggcggtgctggttcactttgtttaatcagggcaggctctttaaggaagcccttgaaggcatacatgggagagcctgctctcccttgctgggcctggccacctctaccccatcctcctctaaaaacagcgttttcaagatcaaagaggctaaactgacaccactgtcaaaatctaattaaaacctctcttcttctagtaaagatgttaacactggataaagcagatcttcatccccaacaaaaaaagaacttgttttaattaaacatccaattttaagttggttttattgctattgttgtgtttttgtttccatttgtgccagacagaggacaggaagactgtaatctcttacaaaacatacgaacatatgtcctagatggcaagatccctaggcatcttcctctgaagtcctcagtcgcactctcactcacagacatctgctggggtggagggactgtcaaaaactttttcaggtaatctggtgagatgtattcaaagacttaaaagtgtatctttttttttttttgcacttgtctttaattatttccttaatctctggaaatggaatttatctgcagtgaggttcattatagtgccatttgcaaagctgaaaggctggcaacaacctaactgtccagccacaggggataatgacgcattcatctactggggcatggggcacgagcccatgagaaggtgacatgatttacaagaaatctagaatgtgctgttgagtgaaatggtatggaccagtatgatcgcattgtcattgatttttacctgtacattcataagctcgaagaaatccagacagttaaatctcaaaatattcagaggagtgacattgtggaagatttttattttctcagcaacattttcttattttacaaacatcacatatatgacttgagtaattttttaaagttaatgtttaaaagagaacaaaatagttgcccagagtaaccctgtcttttaagtatacctcctaccccaaagtgggcagtaactggcttgtctggcacccatgggtgatcttgtctaagcttgctgccctgttcttagggtcgggggctacctgggtattaacttgagtctgtggattgctgtgaagtcattgagaaggaacacaggccctcccagagtgcaggcacacttgaccatgcagtgcccaccctgccaggactcatgggagaaccagccattctgctcagctcccggttagtcagtcccttccccgctcaatgtttccaagcacccaccctcagtgcatttactgagagtcccctgaccatcagacaaggactgtccacaggccgtgagggagggaggggcatcaccgaggctgctgggcctgctttcacattgcctgtccgtggcatggaggttcctccctccctgatccaccccttgttcccctgcccatgtgaacgctgggattgggcctgagaaagaaggaaaattgcttcggcttccaagactagcctttctcatgtttgtcttgagtgtatttctgagcagaaaaacaagcttcacaaacctcatgactcaccttcatgttttctgtatgcttccctctcccctgccttgtctcactgatcccttgaggctctccctccccagcccacatttactccatagcttccagtagagtttttcaggttccctgcaaagtgcaaatatacacacaattctgtgagtcaggcagtatcttaaagaggttccatcacacccgaaggtttggagtcactagcctgtttgtgacatgtcttcaaggatgaacgaaagatttgaactcttcagccttaaaataataaataaaacctgaaaatgaaaaacctcaccaaattaagcttctgcccattttagaaaacaagggcaaccacggaggagatgactcagttcttaaagacaaggttacccaaatgggtgcattgtgggatccaagaaggatgcttctgagcttgttgagctcagcatcagcacagacatctagctagtccgagaactcagatagggaccaggctctgtcctggtgggttaaatcttaaatctctatgtagcccattactatcagcaaatggatctttatttaagctctgatcttgtattgtgtgtatatccttctccccagctctgagctctctgagaggacagcctacagtttttccatttctatctccagggcctactcccaaaagatgaaccttcaactgtctacattgcacgtctgggccttcagcatcgctgatgcgccagctggcaccagcttcagcagcccagcgcatctgctgtgcttgcatctgccatgtcatcgtggggtcctgggcccctgaatgcagcaggccagcttatgtggtcccatcctctgcatctctgtctgcctctgcagtgcagacggctctgaagtcacaccagcctaacttccaggcccagacctcagggggagccagattgccatatcattcctgtatccagatccagatttttcctgctgcctctgttcttcctaggccgcccctgttattcaggccatctcgtcccactgccaacatgagcaccaagaactacatcattccattgctttcagcattccctccatcaatggtggcaccgtacacagctgtgtctgtgtaaaacaagagttcccctgcctgaagtatgtggggggccctttgctgaaatattttagctcagattcttttagaagaagtttcactcttttccatgaggacttttctttcatcctcaggcatcaaatgcccgttagaaagttctcagttttgcctgcatgtcaatgtttctaaacagtctcatttttattcctgttgttgtgaaataaatgccttaatgtcccccttgcccatactgactgttacaatctgcctggccatgcctcgaccttcccagataccatgcacctgtcccccttgcccatactgactgttgcaatctgcctggccatgcctcaaccttcccagataccatgcacctgtcctacgccataattaaaatttactgcaatcttagctttgtcatctggaccgtgccatataaaaagaaaggcacaacctcagaatgtttttccttctaaattgctgtaaaattatgagttatgtcaactacaataaaacttcaattattcagatgcactaggggaacatgaccaaattttgaatgagtgaagcagctttacaaaaaagcagaaggtgcgtaaggaaagaagcgagatttcagagcttctcatttctgctacaggacaatcagcctcgcgctgcagcagaggacacaaggaacccacctcggagtaaatcagagagcacaccacaaatcagctcccctgatagggtaaggtggaaatacactactggagggaggcctctctcctgtgcccatgtgagatgttggctataaaccccatcctggccagagcagtgattttccactaggcaaatttaaatgtgtgttattgtctagtatgtgagataacaaaattgaagataaactttcactcaccaaaaacttgccatatctcaagtagagtgtcctccctctttcttgcccacatctcaccttcattctagtcatgggtgcttataaaccctattctgttagagacagaaagggttaacaagcaccatgagccaacacaagttcaagatatcatatacttttgattgtctgttttgaaaacgtttatgccgagggaaatgttaaagcaggtgtccgaattagaacaagtgtccatgtaatacaagaagatggattttggctaccaagagccacaagagcagagacggaaccaaaggcaagatgacgtgtcatgagttacaaggaagcagaaggcaagccacccacatctcctttagttctttaggcatttaatcagctagaaaagctggtgcctgctgctccactcccagtggcctatccattatcactaaaataataatgacaaattgagaaaggcacagaggacaggcaaatgtgaagccaagtgttgaagacggcaacaggaggtgacagccagcagccctcaaacaccagaaggagccagtgtcggccttgggggcctcctcctctggagagcaaagccagctgtctacattcatagcccaccagaaagggcagatgagacaaggagggctgcaggacagtgacaaagaattcaaccccggagctgcatcagccctaaagcagccttgcctcatttctgcctgagtaagagcaagccctggaatcacagtgaagggattacattagacaggacctacgttagacaggagcaggggctctgacacctgggcttagctgggagctaagggggagctgccctctgcaggctggctcaccagactcacctgcagagttggccactcaaatggctatctagagcccagcctccgcagctgtccagcagtcccctgcttttgggttgcagactctagcacccaaattccagaatcctctcttgtctcatgagctcataggttaaggtacagcctggtttattatcctgcacaaaatcctaatgacttaaattaaacaacaacaacaacaacaaaaaacagaaaggcccaccaagcacccagaactccctggagctccagcttcttatgtcctaaatatcaaaacatcatcttgtgacttcattattctctgtgtttccattctttctataattcccttcccaacaaccttcacccaggtaactcctgctactcctgctcttctgcagagaccaccttgcataccacccctcctctcccgttacattagaggcccagttgagcattttattttacctttgggacatttattcctttattcactcagcaaatatttattgtgcatctactagtcataggcacagagctagacaatggggattctgccatgaccaagaaagaaacaaacagtccatgtcttcttggagcttgccatctaaaggggaagacatcattaacaagacaaaacaaacatcgtatgatagcatatgatgctagatagcatattaaatgctagatagaaattaaatgctagatagcatattaaatgctagatagaaacagcacactgagctatgagaaaacagcacatgctggacctgaggtgaggccactacaactgaagcactactgtaaacttacacagttttccttcccagtcccaccacctcctgacaggaagcactctccacaaggcagggccccatgaccagcagctcacaccacagcacagggcaccaggcacgatgaagggtcggcgagggcaggggctcttcacccagaagactctgaactctggctttccttcaccttcctctgcacccagttgcacaatttgttcctcataattaatccatttgacaagtgagaaaactattttcaaagtaaacaaaataaatcaaaatggtgctaacttctctccctaatgtcctccatcaatcatggatgactcgagctttttaaacagagaaactggggcagtggagggagtgaaaaaagttttaaactcaactgtgctcccaactctataacattaagatgctggaattgatttgttgttaaaaggagagttgcaagtactatctatgcctagaaggaggagggaaaaaaatcaatagtaaaccatgtaattgggagaggggtgaagtagaaaagggtatattccctactgactcagagaaaaacgcaacaaagagtcaaaacaccctgatttaatgcctaacttaaggctgcacaaggcagagcgacagtgccaggaagatgtagaagaaggaagtgttaacttgaaatgactctcaccagcctctaagggcaggagctgaactgtttgctgaaaaccaaaaattcacaaaggaatagtgggaaaagaggaaacaaggatagcataggtcctccagagaaagacagaagacagagcagccagccttccaaatcggaagtcacatgctcacctccacagtgcctgtaaacaactttttttttttaagtttttatttatttaattttgagacagggtcttgctctgtcacccaggctggagtgcagtggtgtaatcatagctcactgcagcctggaactcctgggctcaagcaatcctcctgcttcagcctcctgagtagctgggactataggcacataccaccatactaggctaatgttttaattttttgtagagggcgggctctctctatgttgctcagggtggtctcaaactcacggcctaaagtgattaccccaactcggcctcccaaagcattgatattactggcatgagctaccacacctggctctttaatttttgtacagtgtattgctatgttgcccagactcaacttaaactcctggcctcaaggtatgctcccacctcagtctgtcaagcgctgggatgacattcatgagccaccacaccaaactgcttaaggttttgccattcaaattaaaaataaaggcaggcacactaggatggctacagtaagaaatatggacaattgccaggtgttggcaaagatgggaagaaatcagtgggaatgtaaactggtgcaatctctttgggaaacattctggcagttcttccaaaagctaaacagagaattcccatatgatcccagcaattccacgcctgggtataaacccaagagaactgagaacatatggccagagaaaaacttgtacatatatattcatagcagcattattcataatagccaaaaagtggaaataaaccaaatatccatcaacaggtgaatggataaaccaaatgtggtacatgcacacaatggaatattcacatataaagaggaataatgcactgatacatgctacaatatgaaggaaccttaaaaaatgctgagacagtagctggacataaaagacaacatattgtatgattccatttatatgaaatgtctagaagaggcaaatccatggatacaggagttggcttagtaactgtcagggctgcaggaaggagagtggaatgagaatgactgctagaagtacaggtttcttttggggtgatcgacatgttctgggattaaacagtgctgatgactgcactcctttgtgaatatactaaaaaccactggattgaacactttaaaagaattttatgatatatgaactacattttaataaaaagaaaataagggcagaacatatatggtaggaggtggttaacctacttgacaaatttatctcatcatcataaacaatacagtaatcattaataagatatatatttaataaatcatgcccaatttagcaacaccttgaagtagatggtttgaggttaagtattatggccctgaaaatggtaaaaatattacttttgaaacattttgtagtatcaaacttttaataaattctatctggcttccaatagctatgtacattaggcaggtattatgggctgaactgtctcccccacaaaattcttatgttgaagttataactcccagtaccttagaatgtgactgtgtttggagatagggcctttaataaagaggtaactacgtaaaatgaggtcctgtggttgggccctaatctgatacgagtggtgcccttctaagaagagattaggatgcaaacaggaacaggggaaagactacgtaaaggacagggaaaagacgacatctacaagccagtaagagaggccttgggagaaaccaccctgtcaacaccttgatctcagactgccagcctccacgactgtgagaaaataaacctctgtggtttaagccacccagtctatggtactttgtcatgacaactctaggaaactaatacagaaggcgttcatgtgttaaattcagatttaactctatatttattatatgctgaagcatatgatagtgaactaatagagtgaactaaccattacaagagctattccattttctaaaagccatcattaagcatttaactataagggtccaccgccaaagtaaaacatattttttgtttttttttagagacagggtttcactctgtcaccctgcctggagtgcagtggtgcaatcacggcccactgcagccttgaactcctgggttcaagtgaccctcctgtctcagcctccccagtagctgggactacaggtgcataccaccatgcccttctaattatttttactttttttctgtggagacacggtcttgctatgttgcccaggctggtcttaaacttgtgacttcaagtgatcctcctgccttctcctcacaaagtgctggtattacagacatgagccactatacctggcctaaaattctttttagaaaattaaaatacttttgtgtgtgtgtgtgtatatatacatgcatactttaaaagaattttattatatatgaattacatatacgtgtgtatatatacacacacacacatacatacacacacacacacacacacacacagtagaatattactcagccacaaaaagaaataaagcactaatagatactttcctggggtatcaacgtgggttgctacaacctggaagaacctcaaaaacattatgctaagtgaaagaagccagtgacaaaagggtacatactgcattattccgtttagatgctctatcaagaacaggcaaatccagagacagaaagcagattagtggttaccaggaggtggagaaggcagaaataacgagtggttacttaatgggtacagggtgtttttctggaattaataaaaaagttttgaaactagagacaattgatgcttgcacaacatttagtgaatatcctaaacgacactgaattgtacactttgaaatggtaattgtatgttatatgaatttcacctcatctaaaaaatcatactcctaccagtatagcaggatacctcttcccacacaggttctaagaaaataatcagctaagtgtacagtcatgcatgggtaaaagtgtttgttttagcatgtgtattgttaaaatgttttataatagtgaaaatttgcctaatgttcatcaaagagtagataaataaatcagagttcatctatatattggaatactaaacaaccgataaaaacaattaggtagatccacacaaaaaagtcccttcacttagaagcatattaaattcctaagtgctattaaaaatgtaactgttggccagtgaaaatgatattacacacctgaggacttgccacctgtcagtagaaggcaaagctgaactgtgttctgtcccagctttatttacatggctttgttcacgtggctgcagttcccagagcagtgcctggcacacagtaggtgctcaataagtcttagatggatgaatatctaggaagaaccattaaattttaagttttaagaggaagttctgtagttcatatatcacagacattgcactttgtcaataagtagaaagaagattacaaacaatgtatctggaaagctgccattctgagaaatatagacatatacatatgtaatatgtgccaagaaataagtccggagacatacacattaaaaagttaacagtgattatctttacatggtgatattataaatgatttaaaaattttcctttgcatgttgtctgaatttttcttttaacaataagcatagactacttttctaatcaggaaaaaattgaaaaagcaataaagctatttccatgtagaaaataaattccttttattatctataattcaattctgaagactattaattgggcatgctagatgctttcactgatctgctttggttgttctgagttctaaatccatttagttctctaaaataaacaacttactcaaagaaatccaaacctgctcagaaaataccaacattagtaatgtccagccacaccacaagcactggtgggccactgttggtccaattattaagaatctgtctgttttgggtgcaataagcaataggctcactcagtacctatgaggcaccaatagtacctgctactgactaactggccaaagcccccagagtgtcatgagaggggagaaaccatccagtcagtcaataatcacaggttaatgaaagaacactccaccagcttgctatccccgaagaccagaaagctgctatgctcttcagaactcttaacaaaaacgacaatgacaaaaattgttttccttgactctcaccttgagaacaaaagactaaacccaagtacaatgacacaatagagtttcttgtatactgttttcatttctcagtgtcacttctgttttctgtgactcttactttgggagtaaataagtcatttcctccaggatcctgaactggtcatacataaaatcttcccggcaggacaagcctcaggtgggcagggagtctgtgaagtagggagtctcaatcccatctccttcagaggccagtgtggctcaaacttggggacctcactcatcgaagggatatgaggcgaggggtgcgggtgggtagcctgcgccagacctaagggtcccactgcctgtcagctcctgacatgcctgactcagggtccaggagccacatcctccaggctttaagcagacaatggaaattctgatttttatgtaaacgcctgtttttgttctcttagccactaattagattttttaaacactatgcagtccaaaccaagaacatctatgggccaccagtatgcgacacctgagcatttgaccttgagtttgatactgactccaggcctttctactcctggcaagtcacctaaacagaggacaggtcattatctgaggacttttggacttgaattcccttttcatctttatttcatgagtttcctcataaaactctgggggagacgcccctcttaagactctgctgttgtttggaaatcacatcgattacaacccacaatcaattttcccctctagtcaactgcaaaataggattataggtcctattcctagaaagggtgcttagaaaaccattagcagatgttcacaacctgcattcccctaccccacattatcctggattccaacaaagacaggggagccagagtagctctgaaaccaggcctgctggagcgggaagtgaatcacttcccttcagtggcccaaaaacctggcaaagaggaatgatgccttggccccaacagccactgcagaggctggctcttaccccactggaaaccttcgtgtccctcccctacatgcctacccctcagtctgctgccctgcctctcctgcatttctctctactccaaaggttcccgtgcagagggcacggaggcaatccagactccctctctggccagccccccaggcttccagggcactaaggagcaaacacaaatctccctctaagctagaaggacggggcaggatgggtccaccctgcccatccgtactggattcggtagaaatgaagtccatgcacatgtgccatcttccttgtagtagtcctcataaaagctctgagagaggtttcatgtcctttttacagaaaaggagatggaggcttagagaggttactttaataagagagagagaagccttcttagagaaggtgaacttccaactagcatcagaagtcccggcaagaacttgaggggcacactgggagaacagtgagtttccccaaacttagctttcccaaagcacccctactagagcccacgaagtcctcaacactctagccacatgggctaccatgggaggctctagggagtttcggcacagaggataggctccttacaccacaaccaaagacttcagagccggatgaaaggcatgatgggagaacacggtcagccccatagcagacggttggagatgacagcctgaaaaccaaaacagcccacaggtgcttaaagaacacaggccctgcctaaaaagagtccattagccctactgctcctgtccaggttacttcacacacacatgcacatgcagatgcatgcacacgtgcgtacacgcacgcacacacacatacacatacacactcacacatatttcttgcagcaggcaagaaataagggagacttgaatgaagtgcagcagggggcctgggagagatgcctgcaggaaattgctcagagaagaatgcatgggattcagcaacccagaaagctgcaggtagagattgagggaaggctgtcagagggagaattgacttttgtttaataacagcacatccctacagagctgttcttcctgtgtcatgtttagacatctagtttgccctttgtgtggctatctgacccacaagcatctccatgtttggagctagatgaaatgtcagcgctggaaacattgctctgagaattttctgcataagaattatatttgaaattgtatatatagatgtaatcagcaagaaagagggtatagaggagagggggataaaagcaatgaatgatgccagcagcagaaacagagactgagtctgggaatctcctactgagtacctttccaataaactcctttctgcttgttaacgaaggcaaagcggtttgaaaggagaggaccagagtagcggtggagacctcaaagcagaaatcgctaataaccactgcctttaggagagccaaaccctcaccatttttattcttcagtcattctgctcaggaacaagctttcagggagtttggctgggtggctgcagtgatccacagacatgtcactcgaagtgcttccttggatcacagggaagtggccaatgattgtcccattttacacaagaaaattaaatggtcagacccagatgacttggcaagaccagggctaacaaatctgggtcccaggttccactgctgagaagcaggtcaagggcagtgcgtgcttcctggcctgggcccttgggacactgccataggctgcagaatggttttgtgttacagggctggaagtgctatgatttttttctaaaaaaacaacattacataacttcgcatgctgtgaaaacattcatttattttacatcttcatttcacattgttgcaatttaattttattgttactgatatccttctatacattaatctaatacttcatttggtccaagaagtcagacactgtgaattatgcccatcacccaaaattttatccaatttaacaaccttgatatgatttagaatatctttaagataataataataagagataaaaatgtttggaaaaaccccaagaaaaaagatgccagggtatgtttgatagcctaagtttgcatcacctatctacctcttggccagaagagaaaagaaaaccttcagtgaccatcctcccaacaccgtatccaatgagagaggaaagatatttcctcttagtaaagtcagggtgctttaccacgtgaccttaaccactcatacagagacagctacactgattttggggccagggtattatgtgtgagcttacctgtgactacttattcaagaaagcattctcagcagaacccagactgccttctccttcccatcttctcaaatccacatagagacaagggaaggtcaagtgtagagcaaacgcttaggggatgtgttgggtggggccatgctcaaagttcagtgcaacgcacaaagaactcattagtgattgccaagtgaacaagcaacaaccaaccatgaactcaaaatactcttggaaagcttaaaaatataccccccttggggatgagggattccaaaaactcttgggaggcaggaatcctgctggcacccccaatgcgctacagccatggcccactgtaataaaagatggtccctaccgtgcatctgcactgcctaaaagcacctgggagaggaactttccacctttgacaaaagtaggtaggcttaatgagttaatgttttcaaatgttttctgagctctttgatgggagcagctgtgccactacaaagcagcctttcatctccaggacagaaatagtctctctctttctaccccctctatccagctaagcctaaccaacctcagcaaagccaccctctccaagacaaaaggaaagggaacagctcacgcagaatgtaggctctgatcctgtcttcctttgcctaatgcaccctggctaatttttccctaatggtatcatcagtggcacatgcggccctgctgcaatgctctgtgccatctgaacaacaggagaaacccttctgctggaaagtgaatgcaaacagattctaatcaataggaagagctcaattagagcaagttcagcacacttcaaaggtgttgctactttctcgctggcttatcccacacagcccttttgaggggctcgaccttgggagctggctggcaacaagagctgctccagacaactctgtaactggaccagcaaacttcccaccatactggatgtcttctacaagccagaagagggggaaaactccttatttcagttcagagccacatttctcctcctgcacaccccagcacctccctcaggacactgagggcaacttagtgaagacctgtgccttggccactggtctgaaaggccctgggtatagcagtgcacagatcatcacaaccacctgcagaaagtcagctgcttcttcaatctgcaaggaaaagactccttcccaagagacctctggtaatgaggtgttaagagtataagagctggggaagtgaggcagaacaggaaacatggcccaaatgccaggcactgttttctgggttcagatcttggcactaactacctatcagctgtggaatcttgcaaaggttacttaacaatcctgcagctaggtgctattgtcatctctggtttataaaggaaacaaaggccgaggtgggcggatcacttgaggtcaggagtataagacctggccaacagagtgaaactccatctctactaagaatacaaaaaaatcagctgggtgtattgctgcacacctgtaatcctaggtactcgggaggctgaggtgggaggattgcatgaactcaggaggcagaaattacagtgagccgagatcataacactgcactccagcccaggtgacagcgagaagactgtcttcaaaaaaaaaaaaaggacaaaaatcctctcaatatctcaaagccttaggaagaaagaaaactatttagcacagtgccaggtgtacagtaagtgtttgataaatgctggctaatgatatgccttctgctgctgttagtaataccgatgtgttggaaaatgttgagaggaactctgaaaaagagctagcggccagaattttcaggaaaagctgcctacatcctcctctttgagtttcataaggcacatttctgtggtactttctcaggacttttattgtgttgaagacaagtttgagaaacactgacttaaataaatttatatatttttgctacaaagaatatctgcagatagatcaagatggccaactagaggaatctaccactcatctccttcacaaaaatgacaaaaacaacataaataactgcattttgagtagagtacctaaaggaaaacactggaagtgacaaaaaccctctgaagcacgaaaatctggaaagccagcatagggagggaagcgaaacacctgaccaggatctgctcagggccaagggaaaggtaagcaggggatcccccatggtctccatagttactgaggctgcctgcaatcccagctacaggctagccccgcagtccccataggccctgagcccagtggaggaaactacctggagtccacaaggtcacattgctccagagaagggacacatgttctccacagtgggacggagccactgggggagcgtattctgccctggaggccattagcccctatatatacatctccatgtcgctgggtccctgccgtcattccactgtgcccacaaaaaaggctgagtgctgtgatcccagctagacttgacggtgcagtcatcatccctgcccccgagcccatgcagtgctctacaatccagggagcaggcatagcacagaggggaggatgccccagaactaggggagccagtgtacatgctgagcagagacctagagctgaccacctcacatctgccgccaccaacaacccctccaggggcggaggtgctgcacatgtgtgcacatcctccgggaactaaagtgcagccagtccagtgattgccatcacagaaagccatacctcctccagaggtggagctgtgcatgccatgtgtccacaaggagcggcccacctggtgcccaccaatgcgagtaaccccacccactccagggccagagccaccaaatgccatgcacatcccccagaaactaaggagtgacctgttcagcagtgccagcagccccacccccaaaaccagtggagccactgtgccaggcacatccccccagggcctgagaaccaccttgtcctgcaacccccctcaatcacaaacaatgctgcaccactgcctttacaaacacccgcaatttaagattctgaggaaatctcagacactgctggcattaattacagtcaaagaaatcagacagggactacactatgatgcccatctagaacaaaagccaaagcaccctacccaacagacaccataggaaacatctataggaaaaggtatttctccacaaaagtaactccatatatttggaaggcaagactatactccaccagatgtgcagatatcaacgtaggaatgaaagaaacatgaaaaaacaagtaaacataacacatccaaagagcacaactctccagtaacagaccccatagaaaaagaaacctataaaatgcctgaaaagggattaaaataatatcaaggaaactcagtgagatataagagaacacaaaatcagaaaaacaatttacaatccaaataaaacattcaacaaaaagatataaaacagaaccaagcagaaatcctggagctaaataactaaatgaatgagataatcaagagcttcaaaaatagactgagcaaaagaaaaaaaatttctgaacttgaagacgagtattctgaaataacctagtcagaccaaagaataaaaagggtgggaagggaattaaaagaatgaagacagtgaagaaagcctacatgacatatgggacaccatcaactgaataaatattcaaaatttaggagttccagaagtaaaagagattttaaaaagctattcaataaaataatagctaaactttttttttgttcccgcaagatggtagattggaggcttttaacacgcctcagccacttggaaatagcaaaatagtgagtaaagatcaactctgaagagttttaattcaagaaggaaaatgtgaattcaccagaatagtgaaggataccccaaatcccattgagaaaaaggtaggcaagcagcccttgtgatagtgtttggctgataaacatgagtgaagcccctgtacataaaaagggcaaagagttttcctctatgactcacctttccacttgggatctgtgcaacccatgccaagaaaggggaccctgattctcccaaaccctggaactaccaggaggagaggctgggagacactgagagggaaagatattggaaaatgctgcatgcattttcccaaccttggaccacggggaagatgtcatttttaatccacactaatacaaagtcagtcattgtttggtgacctaacaatgcagccacgcaggcattttagtctcagactagagactggagcacttgctttggagtggagtagaagcctcccagctgcaatggagcagctagtgtggaaaatgccccagcagtaggcactggaattgggcaatctcccaccacaggactagagtgggaagagggttgctgaaactgtggtttcctctgagaggtgagacttgcagccaagagcagctttgtgacctggaactggtctgtgtgtcattgcttggagtcccagcattctcccccgagaccatggtgtagcagggccctctatgctctatgcccaggcagatatccaggcatttgaagcacccacttccctacattagcagcctaagctgcctcacgcttgctaagcagagaatttggtacagtggggctctgcttcacacccaggcagatttccaggcttaaggagtacccatctgcctggattagcagtctgagctacttcatcctttctatgcagagaccatggtggagcagggtcaactccactccttgcccaggtagatctccaggcatatggagcatccacttggctggatcagcagcctgagccacctcaaccttcttctgcagagaccatggtgcagcaaggctgtctctgctccacagtcagagatctccaggcactcagagaacccactcacctgatttgcttcttgagctgcctaccccagtttcctacaaagaccttattgcacaaccaattactccactcctcaccagtagatatatttccaggcaatcaaatacccactcacctagattagtagcctgagctgtctctccctcccactgcaaagaccttgttgcagcgacagtttttccagggcgaactcccaagtatgcagcatgcttgctcccctggataagagcctgagccacccctctcttcccatgctgagatcttggcgcagcagcacattctcttccccatgacgggacatatcaccaggccttcagtgcacctgccccccggaatagaagtatgaactgttatactcttaccacacaaagaacttagtacagcatcactcccttcacttcacattcagatataactccaggcatttgtcacacctgctcccatggataaggagtttcagccaccctttgtctcatgtaaagactttgtagtggcagcagtctctctgctccttccccaggcatatcatctcacacggggcatacctgctcttccagagtaggagcttgacccactcctcccatcccctgcaaagaccttgtttgaacagcagtttctccactccctcccagagcatgtggcacatctgcctgccttaatgagaagcctgagctgcccttcccttcaggtgaagagaccttagtacaatggcactctctcagcttgatgttcagacatacttccaggcatttggagcacccattcttctagattaggagtttagggcattcccctctcccttccagaaacttggggcggggaaggttttccaattccacatctagacacatctctgagtccttggcagcttccactgcaaaagctggtgcttgtaactgccattaggtctgcctagtttggccctgcccatcttggtgcccctacctaggactgagcagggaactcagatcattgtgcattccaaagatcagccccttgcttgaggcaagagagagcttcctccactaaacaaggatcaagtatattcctgtcaagtttggatgcagccagctgttacccataagcaccacctactggcccggaggttgaaagataaaacataacaagaaatctgaaacaggtgcacagtactggggaacaagataagcttcctaagacctctactaccctggccagagaaggaggcaatgagcctgctcatatgcccaaaatatagttactgcaaccagcatttagcaaagttgccaaataaaagctatctaaaaccaaggaacttaaaatagactatttggtactgaagacacctggaaccaaagccataggaccctacataacaacatatattatggataccttcctcaggggtagaaaaaagatgccatccaaacaaaagcaaactcaagaaaggaaagatagtttatccacatgagaaaaaaccagagaaacaattctaaaagtatgaaataaaaaagtattacaacacccacagagtgaaacactaactctccagcaacagatcctaaccaagataaaatctaaataccaggtaaacaattcaaataatttattttattttgtacttttttgagatggagtctcgctctgttgcccaggctggagtgcagtggcacaatcttaactcactgcaatctccacctcccgggttaaagagattctcttgcctcagcctcctaaatagctgagactacatgcgcacaccaccacgcctggctaattattgtatttttagtagagacgaggtttcaccatgttgaccaggctggtcttgaactcctgacctcaagtgatccacctgcctcagcctcccaaagtgctggggttacaggcattagccactgtgcctggcctcagattattgattttaaagaagctcagtgaaatccaagagaaagctgaaaaccaacagaaaagaaatcagattagcaagtcaagacataaaagaagagataggcttcattaaggaaacagaactcctggaaataaaaaattcactgtagcagttataatatacagttgaaagctttaacaataggctagaacaagtagaagaaataatttcagagctgtatgataggtctttcaaattgacccacacagatgaaagaaagaaaggaaagaaaataatttaaacaaatcaacaaagccttcaagaaatatgttatgtaaaccagccaaacctacgagttgtaggtattacagaggaagaaggaaaaaaagttaaaagtataaaaaatatatttgaagaaataattcaagaaaacttctctggttttgtgagagattaagccatccaggtaaaagaagatcagaaaactcctggaaaacacattgcaagaagaaatacactaagacataaagtcataagactatccaaaggcaatgtgaaggaaaaaattctaagagtagtaaaagagaaaggtctaatcagctataaaggaaatgccatcagattaaaagcagactattcagcagaaactttacaagccaaaaaaattggtggccttttagcctccttaaaaaaaaatgggccaggtgcagtggctcacacctgtaatcccagcacttttggaagccgaggcgggtggatcacgaggtcaggagatcgagaccatcctggctaacacggtgaaaacccatccctactaaaaatacaaaaaattagccagacatggtggcgggcacctgtagtcccagctacttgggaagctgaggcaggagaatggcatgaacctgggaggtggagcttggagtgagctgagatcgtgccactgcactccagcctgggcaacagaatgagactccaactcaaaaaaaaaaaaaaatgccagccaagaatcttatatcctgccaagctaaccttcacagatgaagaaataaagtatttcccaaacaaacacggaggaaatttgtaaaaattaaaatggccttgcaagaaatactcaaaaagttctagacatgaaaataaaaggatacttgctatcataaaaggccatataagtaaaaatctcacagattctctaaagcaattatacaatttaaaccccaggggcaactaggcaacaacactatgacagaaacaaaacttcatatattaatattaaccttgattgtaaacggcccaagtgctcaacttaaaagatacggagtgggaaactggattaaaaaaacaagatccaaccacctgcagcctataagagacaacacctctgggctaaagacagctacagactcaaagtaaatgggtgaacaaagatatatcatgcaaaaggaaaacaaaagaaagcaagattagccatcctcatatcaaataaaaggaccttaaacaaacaacagttataaaaaagacaaataagagcattatataataataaagagcttaatgcaacaaaaagatacaactatccaaaatacacgttgatatgacttggctgtgtgctcacccaaatctcatcttgaattgtgtagctcccataactcccacatgttgtgggagggacccattgggagaaaactgaatcatgggggtggttcccccatactgttcttgtggtagtggataagtctcacaagatctgatggttttataatggaaaacccctttcgtttggttctcattttctctcttgcctgctgccgtataaaacaggccttttgccttccaccatgattgtgaggcctccccagcaatgtgaaactgtgagtccattaaaactctttttcttcataaatcacccagtctcgggtatgtctttatcagctgtgtgaaaatggactaacacacacatgcatccaacattggagcacctggattcataaaacaaatactactacacctaagaaaacagattgatagaaatataataatagtgggggacttcaacaccccactgacatgacaagacagatcactgaggcagaaaatcaacaaagaagctctggacttaaattggactatatagactaaatgaacctaattgtcacttacagaacattatatccaatgatcgcagaatatccattcttctcaattctgcatgaatgttccaaaactgaccatgtgcctgaccacaaagcaagtctcaataaattttaaaaacctaaaaatcatatcaagcatcttctcagaccacagacaaataaaattaggaatcaataccaagagaaatgctcaatactacacaagtacacataagctaaacaacttgctcctgaataacctttgggtaaacaacaaacttatggcagaaattgaaatctttttcaaaacaaatgaaaatagatacaatgcaccaaaacctagggcacagcaaaagcagtgctaactggaaagtttataatgttaaacacctacatcaaaaaaaaaaaatagaaagatgaaaattaataacctaacgtggaccctcaaggaactagaaaaacaagaacaatccaaaccaaaatctatcaagagaaaagaaagatcaagcagaactaaatgagattgagatcaataaaataatttatacaatgaacattccaactgataatacacaaaagagcatcagagactagtatgaacacctctacacacataaaatagaaaacctacaggaaatggatagattctgggaaatatacaacctcccaagatacaaccaaaaagaaataaaatcctgatctgacaattaatgagtaataaagctgaatcattacttccaacaacaataacaaaaaggcccaaaccagacatattcaaagcaaattttaccagatatataaaggagatctgttactaatcttattggaactattccaaagtattgaaaaggaaagatccctccctaactacttctatgaatccagtaacactctgataccaaaattaggcaagaacacaacaacaacaataaacacgacaggttaatatccctgatgaacataaatgcaaaaatcctcaacaaaaatactagcaaacaaatccaacagcacatcaaaaagataattcataatgatcacgtgaattttattccagagatacaaggatggttcaacaactgcaaatcagtaagtgtgattctttacataaacaggactaaaaacaaacaccatatgaaaatctcgatagatggagaaaaggcattcaataaaattcaaaatcccttctaaataataaatcctcaacaaattacacatcaaaggaacatatctcaaaataatgagaaccttctgtgaaaaatccacagccaactttatactgaatggagagaggctgaaaacattccctactagaactgaaggaagacaggatgtccactctcaccactcctattcaaggcggtactggaagtcatagccagagcagtcaaggcgtaaaaaaaatgaataaaatacaaattagaaaagaggaagtcaaattatctcagtcccttaatgatatgatcatatacctaaaaaaacataaaaactcctctattagtttggcagatttgagaagtgaagctatcaggtcctgggcttttctttgctgggaaactttttttgtaccctgaggtgcatcactggattatttgaaaactttctactgttttgatgtatgtgttaattgctataaaattccttcctactgctacttttactgcatcctataggttttggtatgttgagtttctattttcatttgtttccaaattttttttgatttccttaatttcttcattgacccagtgattgtccaagagcatgttgtttaatttccatgcatttgtacactttccaaaataccttttgttattaatgtcttttgtattccattgtggcctgagaatagacttgatatgattttgatgttttaaaatttgttgaaacttgtattgtggcctaacatgtggcctatcttggagaattttccatgtgctgatgagaaaaatgtgtattctgtagctgttggataaaatattctgtaaatgtctgttaggtccatttggcctaaagtagaattaaaattcaatgtctattgatggcctgtctagaggtctgtccaacggtgacagtagggtgttgcagtctctagctattattgtattagagcctaacttcttttttaaacctgttaatatttgttttatatatctgggtgccctggtgttgactgcatatatcttcttggtgaaatgactcctttatcattatataatcatcttctttgtctctttacagtttctgacttaaagtccattttatctgatgtaagtatagctacttctgctttgttttggtttctgtttgcatatttatttctatcccttcaattcaatctatgtgtgtcattaaaggtgaagtgactttcctgtaggcaacatgtagttgggtcctgttatttccttttttaaatcctttcagccagtctgtaccttttaattggaaaatttaatctgtttgaagtcaaggttattatttataggtgaggactgacctctttcattttgttaattattttctggttgttttgtgtattttttgttcctttcttcctttcattttattctgataaaagattttttttaactacagatgcaattccatgacttgttaatggtctgatcaggatttctatttcttcctggttcaatcttggggggctgcatgtgtcctagaatttatctatttcctctgggttttctagtttgtgtgtatagaggtattcatattagtttctgatgttcttttgtatttctgtattatcagttgtgatggcccctttatcatttctgattgtagttggaatcttttctcattttttgttgattaacctgcctagtggtctgtcaattttgcttaccctttcaaaaaccaactttttgtttcattgcttcattgcataatagttattttttcatcttaatctcatttagttctgcttgatctctttgctttcttttcttttgctagatttgagtttgaattgttcttgtttttctagtttcttaaaaattttgaaactttgatcaaagaaactgaagagttcacaaacacatacaaaaaatagaaaaaatatcccatgttcatggattgtaagaatgctgttaaaataactacactaccccaaaagatacaaagattcaatgtaattccaattgaaataccaacaacattcttcacagaaatagaaaaagcaatcctaacatccacatagggttgcaaaagatcccaaacaactaaagcaatcttaatcaaacaaaaacaaaaacaaacaaaaaacaaagttggaggcatcatactactggactacaaaatgtactacaaaatgttagtacatactgtactaaccaaaacagcatagtacttgcataaaaacagacacatacacaaacggaacagaatagagaacccagaaataaatccatttatttacagctatctgattttcaacaaaggcaccaagaacatttagtggggaaggaacagtatcttcaataaatggcactgggattatccatacccagaaaaatgaaactagactactatctctcaccatatacaaaattaactcaaaatgaattaatgacctaaatgtaagaactgaaactaaaaaactactacaagaaaacataagagaaatacttcaggctaatatctgtagaaataaaacctcaaaagcagaggcaacaaaagcaaagataaatgggattacataaaagtaaaaagctctgcacggcaaaggaaacaatcaacggagtgaagaaacaacctatagtataatagaaaatgtttgcaaactatttatccaacaagggattaatatgtagaatatacacaaggaactcaaactactcaacagcaaaaaaaaaaataataaaaataatcaaagtagcaatacaaatggacaactatatgaaaaaatgtacaacatcataataagagaaatgcaaatcaaaaccacaatgagatatcatctcactccagttagaatagtgattatcagaaagacaaaaaaaaaagcagttgctggtgaggatgtggagaaaagaacttttacacacttttggtgggaatgtgaattagccatcataaaaacagtatggaagttgctcaaagaactaaaaatagaactaccatatgatccagcaatcccactactggtctcagtcatatgtagaagctaaacaaattgatctcccagaagtagagaatagaatagtggcaactagcagctaggaagggaggagagatagagagaaggtagttaaaggacacaaaaattatagcttgataggagtaagttctagggttctacagcattgtaggctgaccataattaacaataatttactctatattttccaatagctagaagggaggactctgaatgtccccataatgaaattataatggtttgatgtgacagatatgctaattaccctgatttgatcattataacttacatacaggtattaaaatatcacaatataagccataaatatatacagatattatgtgtcaattttaaaagaatacctgtaaacatcaagatatatgaatgttatgaagatcaaactgagaactgcaaaatcagcatattctccactcagtctcttcttctcccaaataataacatacatacctgacagacatacaagaccttgtgcaacatgtgagcaggaacgggcaggtagcaggctgaggtgtctgcccagctcagtatttggatattaacctccactgtatttcactttttccttcctctagactggatcattccaggctagagaacattgttaatttatcttctatttgcttttgaactgagtacatttcagggtttagttttgtttttgttttatctatatctagctacatatttcatctctttaaaaaataaaaagaaaattgagctgagacaattgggttgttaactctatcaaaaaactttgcagccttaaaaaaaaaataaattggatcagtccattcactgtcctagtatctgtagccccaatttaaagccttcctttttaattacaaaaatctaaattgagaaaatgcttctccccaggaagattttaatatacgggaacagggcacagtcaccctaatacaaagccctaagcagcataggtgggccccaggacccctatgaaatatttcttgcactgtttctcgtgcgcaaaaagtccccagagatggccagcaagactctgcaactttcaattcattattccatacctgtccttctaaacctctatgctgggaccaaagtcctactctaccttaccttaccagggattgtagggttttcttatggtcaaaacaaaacaacaacaacaacaacaaaaaccacacacacacacacacaaagaaaaacccttagaagcttaggtccatatcctataaaaagaatgtcacagttgcactttcaatccctatgtcttgaccatctgagctttcacccatagcagaaactcagacttctgcccacatgtgacctccctgaggataagctggacttgtaacagatagaggtatggtaaagaggcagtcgcaattagcccttccattttgtccccataaggaggtagggacacagtgctttagttccttcccagactccaagatgccctcctacagccagatctcactcaagtgcaaggcagtaaaaatgttaggagttcaggctgtagagtcagcctgctctgggtttgacttccagttgcatgatccaaagaaggtggcctaacatctctgagactcattggcccagtttaacagatgaagaagctaatagtcgtctcacaagccatagtttggagagagagagagagagagaacataaatgaagctctcagcttctggaacataattaatgccagccaacattaagaacttatcatgataattagtaactaattaatggggaacgaatgctcacaaaaaggagggaaataaaaagcacagaatcaatcaacagggaaatagttaaatgaactttgttgctttcgggtttaggaagcactggcacacacattgcctcattttattatggtgaacatgtaaaagaggcaggtaccattattcccactccacatgttggaagtaaagctcagagttgcaaagaaaacgagtacttaaacaaaggatttctcagcaaggcaaaatttacttctgcagaagggtgctgcttgcatgtctggtcaccacaagagcacaccgaacaaagtggggaaggggcttttatccctaatgcagtttgtccctgctactgtgtcctgtatccattagctggagttggactgcacaatttaagctgaaccccactggctaacttgagaggtgcaggaacgtggttataccaatgggaagggcagttttggcaggaagagctgttgcgacaggaggggtaattcgcagaatgggttagcatatgtggtctttgcagataaggactggcgggaaagttgtttactgaaactaagacagggaggcataagggataaggaagttggtttgggcttgaagtagggaacaaagaacaagggcactgaacaagctaaacctttgaagaggaacttcttttgtatctgacacacagactagaaaaagtgtcctagactgggcatggtggctcatgcctgtaatcctagcactttgggaggctgaggcaggtggatcacctgaggtcaggagatcgagaccagcctggccaacatggtgaaaccccatctctactaaaaatacaaaaaattatctgggcgtggtggtgggcacctgcaatcccagctacttgggaggctgaggcaggagaatcacttgaacccaggaggcagaggttgcagtgagccgagatcacaccattgtactccagcctgggtaataagagtgaaactctgcctcaaaaaaaaaaaaaagttctaaaaatgtgggtgggtttgccagaggccatatgaccaggaggtagagaatccaggacttgaatccagatattctgtccctaaatccactaagctaagttgtttcccacggaaaactgaactccttttttataaccttctaagagggctagctttttaagcaaccagttctgaaagcatgttcgctaatgaagagccctcgggaaatgccaaggaaacctttgcatgggtgacccttatcttgcctccgtgtcctggccaccagaactctgctgttcttcattattttacgttgaaacaagatatgcccccaaatttcctgacaccttttccatccaccctactatatttaaaaccaccagctctgtgcaggggatgggaactctggaacaagttcatgggactacttcttaagaaattaaatggtaatttttaaaaagccacacccgaagaaaaaaacacacacacacaaaaacaaaaacaccagtgtagtaacatagatatgacaaggcctgagtgacttttgagattaaaagtgaaacatttcttagaaaatgatgattgacttgatgccttagactctccagcacaattgctggcctgtggcctcactgcggctgtgttctcgagcttgggtcctttctgactcacccgtagaccacagtgacgcctcctaattaagactttacctcttcttctcgccctgccaagtcactgtgcacccaataaagtctctttagaatactttcaacgtcattgccttgtgttcaatgtattttgcatcgtattcaacactctctgtagcccaatctcaaactaactctccgctctctctcttactgcttcactacacataccatactgtggccagacaactctccaagggaagacctctgcttaaatggcagagtgaagtgtttcctaaagtcctctaaaattctctctgtcctcccaatccccttcctaaaaatctgtggtcaagttaagaaatgttgcttggtaatccttgatctagtttcctcacagttgttacattattgcctggtggccatatttgcagaaagcccagaactctgaatatttagagttgggtgaatttttttttcctgacctctcccacctactagtcatatgatcttgaacatgtgaaaactcatctgtgaatattttctcatgtaaaaaatgggagtaatacagctttgcctatatgcttagagtctacttcagaagcgttccttaatgtctaagtctcttaaaattcttatgagaatgtctgagcattccccagtggcatatctggacagtgctctgtagaaggcattctactgggtgtgtgggagagtgaaagatacgtaagatctagctcctgttccaatgaacctttgtaggtgaggagactcctaccaaaaaagtctgtactactgcacattaatagtcaaatgataaactatgatgtacagagaaaagagaaggcactgtagactgggtggtagggggatcagctcatcctggtctgtctgggacttcccttgtgttagcactgaaagttccatgtcctaggaaacccttcagttgtgggcaaaccaggagggccgatcaccctacaatggttaaggaaggcttggcagtgattggagtgtgtctcagaggggcattttaggtggtaggaaacacacaaattgcctctctactaaacaaacatacacccaccctatgactcagcaattctagcgatataactgtgagagataagttcatggcagcattatttataatagccccactgcaaccaagcagatgtccaccaataggagaagggatatataattgtgcatttatagactggactattaaatacaacacaggtgaatttctcaggtatagtgttgagtgaaagaagccagacttatgaaaatcagaatctgtatgacttcttccatatgacagaagagagaataattaggagctattgattacaaggggacacaagggagatttggtgtgctagagaggttctatgccatgatctgggtggtggttacatgggtgtgtgtatatatatataagttaatcaagctgtttacttaaaatttgtgcattttattgcatgtattattcctcaaaaaaaaattttaagctgccatttattaagcctatgtgctctgcacagtgttaaacatttttatcctcacaatcctgtgaggtgtagacattggccattttatagattaggcccagaaaaggaaaaagaaaatttctcatgaccaagtgtttctcaaaaagtgtttcaaggaatagcagttctgcaggtgttatctgaaaaaaaaaaaaaagaaaagaaaaaaaaaaaaggcttgtgttcaactatgtttggggaactctgggagtaaaagggttaaatgtacctttttactgcaggattaatatgccaatgtgcatacctgatctcttttgtaaagcctccaaggtgtagtaaatactacagagaaatacctgtagaccaacatttacattttgagaaaatgatttagccttatattgtcaatatttgctttaatattctgagatttttgccctatgacattatgcagttaattttatagtataagcgctgcactcatctaacattaccagctcatatcagcccctcctccagaaaagcttttaggtgatactgttcttccctcatcacagcataatgccatcagcaaattagttattacatttcacagagcctagtggaaacctctcctgccaattactgagtagtcaattacattctggacatatgcattttacactgattaaaaaaagaattacagccgttgattttgcttttcaaattaagagataacatctatgtaatatagaattacagtgacttgactcaataaaatagtgatttaaaagaaaaaaaatgggatttggagaaaaactgtaaccaacacattatccaaaaacaaggaataagaaatgttgttagcctttctaagccccaaagactgaaagacctcagggaactgtaagttctaacctaatactaatactaccttgaaaagccaaaatgttaatttcctccagcactggagaggatttgtctcactagaaaattttagatataaacaccaagtcaaaaataattcttcagtgactctgagcattctgccaatgacaacagatttaaaatgcattttagaagcaatgacagggaattaaatagatttctagtgctgtaaagctgtaaagcttaatattacttcacaaagtgttaaagtgtctgatcttccctcagctcatttggtaccttgtgagcactgaagaaaagctaagtgcaggggcactttattaatgtattggaagccacatcaatggtagtatgcctaacaccttccaaaaagttttgagaaatctaaagtaaaacggcatgtgagttcctaaaagccttaacggaaaatattgtcagctatcacctacaaagctgcctctagctaaaggccagctataaattagagatatttaattttgcagtaacactcacaaaaaactacaatgcattatgcttcccctgaaaataatgcaaagattctaattagtttttaattgcttgctaaattgttcagttttattcaaaatggcctttaaagagctatgcaccaaaaatacttccaatatttctgtgagaaagttgtcagccctcctagcctgaaggcagcagaaattgaactccacaagtgcacaggcatggggggctcacatgatttttagtaagggaggattttatttcaaccacctgtgacctcaccaaaacaaacaggtctgagtgcagaaaacaacttgatgtaaacaaatggaatctgggttgcctgagattctgggatgtgaatgcgttcacctggaaaagataatgtcctgggaggtcactctacccagactcccctttatctaaatattctcaaatgtttctatggtcaaacaccaaccattttagttaagatttatacagaaatgagccagagaaactcttataaatttgacctggttacccactggctactaacagagtcatccacttcctttggaaatggttccaatcctgaagattcaagacaacttcagctttcagtcaagattgagtaacagttatcagatttaccctcctgccttaaataactacaaaagtggacaaaatatatgaagcaatggttttctggacattaggtatcaggcaacacaggactgtgatacgtaagaagggaaatagaaaaggtgaactctacaattataccagcttcctacctgaaggcagtttccaggccttagtacagggaggggaaatgaagctcagctgattcaccaattcagggagacagagtcagagttcagaggacaaggcagccagaatttgtaaggcagagcacaggagatgagggaaatgcagagccagagagcaccagaaacctgcagacggtcccctcaaggattacttgagttccaatctgtatggtgtgagaagataatactcgaggctgggaaagagccaccagaaaggaataagcaggaaaaatctcactcctaccagccagagtgaaaagaccacataatacatgagggaccagacagatttctttaaaataaaggggaatcacatgaggtatctaaataagtcaaaatcatagaaacagaggttggaagatggttgccgggattgttgagaggagacagaattagtgtctaaggggcatagagtttcagttctgcaagctgaagctctggaaacctgttgcacaacaatgtaaatatactaacattactgaactgtacacataaaaatagttaaggtggcaaatttaactttatgagtttataaccacaattaaaaataaaatttaaacataaataacaataaaaatgaataaaaaggaaaggagggcctaaattagcccaagactgctctgcatgtgcccaaacgaagcttacaagcaagcactgaaaggatccaactaatcccaaataactactccacaaagaagccacattacttaaagaaataaaaccaatcacagcaataatatgaaattcttcgtattcatcatccagtcagaaaaaagacagcaaagaaatggaaaaatatgacccatatccaagagaaaaagtaatcaatagaaacagagccagaggcaagagaggtaataaaaagggcaaataaatatactaaaatggctattataaatatattcaatatggtcaggagagaaaaacatcatcatgatgaagagagagagtaaaaaccatttagaaatgaaaaatacaatgtctgaaataaaaaattcacggaatgggattaacagtggtgtaaacagtgcagaggaaaagatgagcaaacttgaaaacatggtactagacattatccagaaagaaaaaaacgacagaatgaataaagcaccagtgacatgtgggataaaatgaaagaagtaacatgcatgcaattacagtcaaggaagtagaaaaaagagaaggtggaatagaataaaaatatgaagaaataaactcatatgatgaagtacaataaactccttgcagaataaaaatgaagaaaaccacacaaagacacgataatgaaatgttaaccagtaataaaatgaaaatctgaaaaaacatccaagagaaaaagatacatgacagcagcattgtcagaaattatgcgagccaaatgacagtggaggaacatccttaaagtactgaaataaactgtcgattcaggattccctacccagcgaaagtcatctttcaaaattaaagacatttttcaaattaaagctgggagaattcagttgtcagcaaaacttaagcaaaagaaatgaataagatactaaacagaaatttgagcctttaccaaagagaaaagagcactggaagtggtcattatattaacactattaaaaaattttaaatctttttaaaggataatagtttcaaacaaaaataacaacaacatcttgagaagtttataaacatatgtaaagagtacaatgtatgacaacagcacaaacgataggtgggaaatggaccttacacagaaggggataaaatattatttgcaggtagtacgtgcatgttgtaaaccctgaagcggggtcagcaaactctggcacaggctaaatccagcctgttatttttgtatagttcagaagctaagaatggtttttgcattttggaagaggtgagagggaaaggaaacgtgaaagcatctacgtcacacaaaatctaaaatatttgctacctggttctttacaaaaaagttgctaagccctgtcctagaataaaatttctctaccttggtgctactgacattttgagccagataatcccttgttgtgggggttgtcctgtgcactgtaaggtgtttagtgggactcctggcctctacccaatagatgccatgaacacccacccccagtagtgacaaattcaaatatgtatccagacactgacaaacgtcctgggggtgagagagaaatctgactgcagttgagaactactgcactagagtacatctatttttttttttttttaaataaaaaagaggtagagctgggccagccatggtggctcacgcctgtaatcctagcacttctggaggccaagcagggtggatcacctgaggtcaggagttcaagacaagcctggtcaacatggtaaaactccgtctctactaaaaatacaaaaattagctgggcatggtggcacttgcctgtagttccagctacttgggatgatgaggcaggagaatcacttgaaaccaggaggtagaggttgcggtgagcagagattgcgccactgtacttcagcctgggtgacacagtgacactccatctcaaaaaaataaacaaataaataaataaaggtagagctgataagccaatagtagaaataaaatgaattcttcaaaaaaaatttttaaactctcattccaaaagaagtcagaaaaagaaaaaagatttttcagataaggcataagtataaaccacagaaaaaatattgataaattagacttgatcaaaatttaaacttctgctcctcaaaagacactgctaaaaaaattaaaaaccaagccacggacagaaggaaaatatctgcaaaacacacatttgataaagtactagctttctcccaccgcccaaaaaaaaaaaaaaaaatatatatatatatatatgtatgtatgtatgtatgtatgtatatgactcaagacaacctgatttggagacaatataaaaagaaggcaaatatgcacatgaaaatatattaaacatcattaataagagaaatccaaattaaaaccaaaatgaactaccacgacacatccacagaacactgaagatttaagagacggacaataacaagtgctgacaaagatgaggagcaactagaactctcaggcatggctggtaagactacaaaatgggacaatcactttggaaaacaatttgaaactttacaatgaaataaatgtgcactcactatatagcccagcaatctcataggtatttgccccaagagaaatgaaatatatgttaaggcaaaaattgttgcccaaatattcttagcaactttatccatgataatcaaagagcatgaacaacccaagtggtccatcaactggtaaatgaataaatagaaagaaacaaactactgatacaagaaacaacagatgaattcatcttaagggcattatgcaaagtgtaagagcaacagcaaagactatatactgactcatttcttttctatgtaattcaagaataggcaaaactatagtgacagaaagcacatcagtggttgccaggtcgaactatgggcagaggaacttgcctgcaaaagaaaatgaggggacttttggaggtgatacaaacattcaatattatgattgtcatagttacacaactgcatatatttgtcaagacccagagaatcatttaaaattggtgatatttttattgtatcaaaaaagatgatataagctgatttaaaacaaaaatagccaggaagcctttagaaataagaatggagtaagagtgagactacattttcccctagtcattagtaggaaaaacaacttgctacaattcaggatgtccgggaaatagtccttctggtcaaatttggtagggtgctagtgctttgggtccttgtacaagaatatacatttaactaaaatactggttgagagtatttaggccacagggttaacagtaggcacacatgggaatttagtattattcccagtaaacggggaaagaatcaactcttcaatagacagtatcaagagaactcctgaggcatttagagaaaaacagttccatatcatacagtacacaaaatcaaattacagatggaatacaaatgtaaatttaaacaagattataaagtcactagaagataatattaaatttttaaaatcttgtgatagataaggcctatgtaaacaagtcacaagacccagaagagtagatctgactacaattaaaacttaaataaaataccgtaaaccaagttcacaagctcagacagcccaaaagatacttcatacatgaaagtataaacatttctataaatatgagtataggttacttataaatatacttatatatatatgatgcatttgtttaaatactaaacgattaaaagccacactgtatacaatacctataaatcaggagaagaaatggataaattcctcgacacatacactctcccaagactaaaccaggaagaagttgaatctctgaatagaccaataacaggagctgaaattgtggcaataatcaatagcttaccaaccaaaaagagtccaggaccagatggattcacagccgaattctaccagaggtacaaggaggaactggtaccattccttctgaaactattccaatcaatagaataagagggaatcctgcctaactcattttatgaggccagcatcatcctgataccaaagccgggcacagacacaaccaaaaaagagaattttagaccaatatccttgatgaacattgatgcaaaaatcctcaataaaatactggcaaactgaatccagcagcacattgaaaagcttatccaccatgatcaagtgggcttcatccctgggatgcaaggctggttcaatatacccaaatcaataaatgcaacccagcatataaacagaaccaaagacaaaaaccacatgattatctcaatagatgcagaaaaggcctttgacaaaattcaacaacgcttcatgctaaaaactctcaataaattaggtattgaagggacgtatttcaaaataataagagctatctatgacaaacccacagccaatatcataatgaatgggcaaaaactggaagcattccttttgaaaactggcacaagacagggatgccctctctcaccactcctattcaacatagtgttggaagttctggccagggcaattaggcaggacaaggaaataaagggtattcaattaggaaaagaggaagtcaaattgtccctgtttgcagatgacatgattttatatctagaaaaccccattgtctcagcccaaaatctccttaagctgataagcaacttcagcaaagtctcaggatacaaaatcaacgtacaaaaatcacaagcattcttatacaccaacaacagacaaacagagagccaaataatgagtgagctcccattcacaattgcttcaaagataataaaatacctaggaatccaacttacaagggatgtgaaggacctcttcaaggagaactacaaaccaatgctcaaggaaacaaaagaggatacaaacaaatggaagaacattccatgctcatgggtaggaagaatcaatattgtgaaaatggccatactgcccaaggtaatttatagattcaatgccatccccatcaagctaccaatgactttcttcacagaattggaaaaaactactttaaagttcatatggaaccaaaaaagagcccacatcgccaagtcaatcctaagccaaaagaacaaagctggaggcatcacactacctgacttcaaactatactacaaggctacagtaaccaaaacagcatggtactggtaccaaaacagagatatagatcaatggaacagaacagagccctcagaaataatgacgcatatctacaactatctgatctttgacaaacctgagaaaaacaagcaatggggaaaggattccctatttaataaatggtgctgggaaaactggctagccatatgtagaaagctgaaactggatcccttccttacatcttatacaaaaatcaattcaagatggattaaagacttaaatgttagacctaaaaccataaaaacctcagaagaaaacctaggcattaccattcaggacataggcatgggcaaggacttcatgtctaaaacaccaaaagcaatgccaacaaaagccaaaattgacaaatgggatctaattaaactaaagagcttctgcacagcaaaagaatctaccatcagagcgaacaggcaacctacaaaatgggagaaaattttcgcaacctactcatctgacaaagggctaatatccagaatctacaatgaactccaacaaatttataagaaaaaaaacaaccccatcaaaaagtgggcgaaggacatgaacagacacttctcaaaagaagacatttatgcagccaaaaaacacatgaaaaaatactcaccatcactggccatcagagaaatgcaaatcaaaaccacaatgagataccatctcacaccagttagaatggcaatcattaaaaagtcaggaaacaacaggtgctggagaggatgtggagaaataggaacacttttacactgttggtgggactgtaaactagttcaacctttgtggaagtcagtgtggcgattcctcagggatctagaactagaaataccatttgacccagccatcccattactgggtatatacccaaaggattataaatcatgctgctataaagacacatgcacacgtatgtttattgtggcattattcacaatagcaaagacttgcaaccaacccaaatgtccaacaatgatagactggattaagaaaatgtggcacatatacaccatggaatactatgcagccataaaaaatgatgagttcatgtcctttgtaggcacatggatgaaattggaaatcatcattctcagtaaactatcgcaagaacaaaaaaccaaacaccacatattctcactcataggtgggaattgaacaatgagaacacatggacacaggaaggggaacatcacactctggggactgttgtggggtggggggaggggggagggatagcattgggagatatacttaatgctagatgatgagttagtgggtgcagcacaccagcatggcacatgtatacatatgtaactaacctgcacattgtgcacatgtaccctaaaacttaaagtataattaaaaaaaaaaaaaaacctcaaatccaatagaacaggcaaaagatgaactggcaattttcagaaaaataaacctgtgaaaatatagtaaatgatgagataatcaaatcaaataacagtaatcaaataaatacaaattacaatgtttttttcattcatcagagaagcattttttaaaattattaatattcagtgttatgaaagcatgtcaaactgtcactcccatatactgtgggtaggagtataaaccagtgctctgttgttcaagacactctggcaaaagctatcaaaattttaaatccacaaccctcaatccaaaagtcttcatccaataatctaaacatagactatcttagagaagacacaaagtgttgcattttgaatcctttttatgtatctatttgtaataatgaaaaactggaaatttgaatacccatcaatactggggaataggttaagtaatgactcatccatccacagcagacatagatgtttttgcctgcaaagcagttcttccatcttcttctagcaacagaaccgccccctttcccctagaaactgcccttccatcacctgggaggtatcattcatgaggctctacccactctctatcaggacagaaatgtgatttaatgggaacagatgacttcatttctctggttgtatagtgagtggtcaaaaaacaagcggaaaatatgacccaagcagatgctagaagaaaggagtctctctctccgagtccataaaaactggggccatctttggcaccacgtcgaacaaagccaacctgagagtgacagccacaccagaaaaggcagaactaaaaagatggatccaccaaccatgcctaaaatcagctcttgtcctcagacttcctagttccaggaccaaacctcataaggcctgcttgagctgagtttctgtaacttataactgaaagaattctggcaatggagtagaacacaaatacacagggatgaggtggatctgtatgtacagacataattttccacaaggtgttaagggaaaacagcaatagcaattttcagagcattattatattatgcctggtttgttgtttttaaaagatatacatttttctgttaatagtgagcgctggcaaaagaggagaatattcattttaacactaacacataaaagaccttgaaaaatattatttatacacattttttaaaatcacacaataaaataaaacatcatgcataaaatttgcatcaaagcccagtcatcaaatttaccttaatttccaaagaagcccatggaatatttttcctagaaaggagaagaaatagcagcagcaaactgaattataaagaaacaaaagtggtattgctcccatgaggtcatcagtgtttgatatataactttcttcatctccctctggaaagccaaatccagaaaataaatatttcaacatccttctacaactccaggaaagggagatatacttgaggtcaaatgatctctgggcagtttttaaaaatatattcatgtttacatctatgttgcaatgacagaccaagaaacctaggaaaggtgatacttgtgaagctcaaatgtagtcaattaacatacagaattttgctacctgccatattcaggttacactaagggaagaccagaaggacaggacacagggtaactcaatcaacacagaagactatcctttttccacatcagtgttttcatctaaaatgccaaatccataccactccagggtgctctcagtactccctacactgtgctgagatgtgtgactccccatgactgagaaaaaaatctactctctgtaacttaaacaagaacgcataaggcctattcactaataactaattatgtgaataaaaattaatattagcttagatttaaactaaaatcaaaataaactctgaaaaactatcatgctataaacaggaacaaggatggtattaacttcactgacctatctgtgtattgtcttgacattctagaaaggtacaaaagaatatataaaatctaaactccaagataaagtgaaaattcaattgaaaaaccaacatgattctttaagatgaataaatggctttatcttgaggcatcatatctagagggaaaaagaaaaaagaataaatggtttttaagtcaatatttgactgaagctgatgcagaattaatcagtattacattttaaaactctttgcaacaggatttttaaaaagaagtaaaaaagaaacctttcaatgatcaaacaataaatctaacatatatccttctacatttagtagcatcttaaaaataagagtttttttttttcaaatttaagaaacaaatataaccacacttagggaaaaaaaaataatactctttctgaaacaccaaaaagataaaatactgtgggttcttaagataattacatatgccacactggcactatggtccataatgggtttgaaaaaataacaagatttgattttattatttcatcactataatcttaatcattaggcatattaatgtcacgtatacttttttaatatttatttttaaaagctatgtctcaacaatatgacaccaaaaacacacagctgatacaggttgtataggtaatcattttgactgtgaaaaaatatgatcagaatactgttacaataaaggaaaaataccttctttttaatcattctcattcagcaacagtaaaaatgctctatgtacacggtggctctgaaggacacatttcatctctttttcagacctgctgtgctatctattgctgttttggtgattacacagttcaatatgaaaatgcgtcccattcagattctcaatagtaagtctgattaggcagataactttccaatcataaaagcttttattttaggacaaccattatgcaaatctagggtggaaatcggactcactgtaattgggataagaagacactctgagaagaaggctgtacatgtgacactgcatttggtgcactcgtcttgcattctcttcctttcttcctcctctttgaagccccagattaaagtataattacactagagagttacaaatgggcttattagaagagaactatatgtttaagacagcaaggctttcagataagaaatctccaaatattttctgttatatgtttttacagtctttcttataaagaaggagtgtttgatgcgcaacacctgctaacagaaataattctacactcaagcccagtagaataatcaaatataaaatacagacataaagcaaactacaacggcaacagtgattcttggggcagcatgtgcaaaatacagtattttgctatctaatatcattgtgatcagaaaagaaatgtgccaaaacactgtttctcattccacttgaactggatccccataattccaacaaacatcacttgtgacattaggttgtcatcagcttgcatgatccccagttcacttaaccttttcttcttcatctggcctttttgtgtaaaggcagaaaccagttcatttacaatttccctcaacttgctcagaaaggtcagatcttgcataaaactccattttagcaggtgcacattgcatcagctcctctggatctactctttcagctacatctgcctttctacttgtctgaattttaagtgctttattttctggataaacaaactatgacaaagttcagtatgcaagctagcccaactaaaacataacatttctacacagtctgttagagctttcaagtgttttctgccaagtattcctgctgtcatctaactggagtttacaaattccttgccataagaatctcaatgagtagttttttccaattctgtgaagaaagtcattggtagcttgatggggatggcactgaatctataaattaccttgggcagtatgaccattctcacgatattgattcttcctatccataagcatggaatgttcttccatttgtttgtgtcctcttttatttcattgagcagtggtttgtagttctccttgaagaggtccttcacatcccttgtaagttagattcctaggtattttattctctttgaagcaattgtgaatgggagttcactcatgatttggctctctgtttgtctgttattggagtataggaatgcttgtgatttttgcacattgattttgtatcctgagactttgctaaagttgcttatcagcttaaggagattttgggctgagacgatgaggttttctaaatatacaatcatgtcacatctgcaaacagggataatttgacttcctcttttcctaattgaataccccttatttctttctcctgcctgactgccctggccagagcttccaacactatgttgaacaggagtggtgaaagttcatatggaacccaaaaagagtctgcattgctaagacaatcctaagccaaaagaacaaagctggaggcatcacactacctgactatactaaaaggctacagtaaccaaaacagcatggtactggtaacaaaacagcatggtactggtaccaaaacagagatatagaccaatagaacagaatagagccctcagaaataatactacacatctacaaccatctgatctttgacaaacctgacaaaaataagaaatagggaaaggactccctatttaataaatggtgctgggaaaactggctagccatatgtagaaagctgaaactggatcccttccttacaccttatacaaaaattaatttgagatggattaaagacttaaatgttagacctaaaaccataaaaaacccagaagaaaacctaggcaataccattcaggaaataggcatgggcaaggacttcatgtctaaaacaccacaagcaatggcaacaaaagccaaaattgacaaatgggatctaattaaactaaagagcttctgcacagcaaaagaaactaccatcagagtgaacaggcaacctacagaatgggagaaaatttttgcaatctactcatctgacaaagggctaatatccagaatctacaaagaactcaaacaaatttacaagaaaaaaacaaccccatcaaaaagtgggtgaaggatatgaacagacacttctcaaaagaagacatttacgcagccaacagacacatgaaaaaatgctcatcatcactggacatcagagaaatgcaaatcaaaaccacaatgagataccatctcacaccagttagaatggtgatcattaaaaagtcaggaaacaacaggtgctggagaggttgtggagaaataggaacacttttacactgttggtgggactgtaaactagttcaaccattgtggaagtcagtgtggcgattcctcaaggatctagaactggaaataccatttgacccagccatcccattacagggtatatacccaaagtattataaatcatgctgctataaagacacatgcacacatatgtttactgtggcactattcacaatagcaaagacttggaaccaacccaaatgtccatcaatgatagactggattaagaaaatgtggcacatatacaccatggaatactacgcagccataaaaaaggatgagctcatgtcctttgtagggacgtggatgaagctagaaaccatcattctcagcaaactatcgcaaggacaaaaaaccagacaccccatgttctcactcataggtgggaaatgaaccatgagaacacttggacacaagaaggggaacgtcacacactggggcctgttgtggggtgggggagggggagggatagcattaggagatatacctaatgtaaacgtggagttaatgggtgcagcataccaacatggcacatgtatacatatgtaacaaacctgcacgttggcacatgtaccctagaacttaaagtataataataataataataaaaagaaaaaaaaaagaatctcgatgagtgactgtcttgctctttatgccaaggtttcctgatcttcatacaggatcacaaattttgaactatttgtctacccttttcatcctacaatcttccccactcaacagatatttattggatatttactatctgttaaacattgtgttaggaactaggatgcagattggtaagacagtgctactttcctttaactcccaatctagcagcaaactctagatgagccccatgatcccagcccccggtattattttcatgacgattaaatggcaaaaggagtttgcactgcaatttgcaatgtaattaaggttcctaatcagttttctccagctggttgcaaaagaggaaaagaggaagtcagagagattcaaagcatgaaaggtttgccttgagggaggctctcttctgctgagatagaggggaccatgaggcaagaatctgagagcagcctctagaagctaagtgcgagccccagcaaatagccaacaagaaaacagagacctcagtcctacaacctacagaaatgaattctgttgatgaataacatgaatgtatttggaagtaggttcttccaactgagcttttcttttttttttttttttttttttgagatggagtttcattcttgttgcccaggctggagtgcaatggcacgatctcggctcactgcaacctctgcctcccaggttcaagtgattctcttgcctcagcctcacgagtagctgggattacaggcatgcgccaccacacccggctaattttgtatttttagtagagatggggtttctccatgttggtcagtctggtctcaaactcctgacctcaggtgatctgcctgcctcggcctcccaaagtgctgggattacaggcgtgagccactgtgtccagccccaactgagctttcaaaccagagcactgtccagctgacaccatgacttcacccttcagacctgtgaagaaataaagaacttgctcttcaggagtggaccctgaaggatgacaaggagtactcttgaaactgctttaaactttccttaactcggtcaatgcttaattcttctctatgactgagatttagtagactgagatctatgtcatcgctttgaagttcacaaatatccagtgagttagctcacctttgctgccaagaaaggcagatgacagggaggcacttccttctaccaataaaaaatggaggcaaactccactattggctccagtaaacacagccctcaacctggcacatggattaccccacctccaacctcaacagatatcagccggagccaccactgctatcacacacccatcctcattctatacgtttatagaaagccaaccacagtaagaagggaactgaaggaccacagaaaccacaatgtcaaggttttgaatgaacagttgaactagctgactttgaaagttcctttctccctcagattctataatgttatagctttaccaaaacttctctttctccatgcccaaacatattctggcaatcttaaaaaaaaaaaaaaaaaaagcaggaagactcagatccttaatcggattttaatgctgaaaaaaaaagtaaattaggtctgatttttctatctaaaattcctaaatatcgcataccttcagtttcatcttgggcactttcttggaggttagagaaaactgtagctttcaccaagaaaacaccataaccttcattttatgatattactcaccaaggatattttgggaatgtcataatgttcatctaagaagacctgtgacactgaaaacaaatgtttcaaggaactgtcttttcaacactgcctgcttaaaaaatcttgccttttttcacactattctaaaaataaagcagaaaagctatgctgctatgctgattcacatgctgtagcacagtgtgatgcagcattcctctgtcatttctgcagatctagaggcaacaaagtattcttgcaaaagactttcaatcattagctactgatattattagaatttatatactatttaggcctttcaaagtcggaaaacaataggacccaacatgggaatgtaataaagcataatttcttaggtgaaatcattccaacctttagaaagcaagtgtctcggccaatgctcagcttaatgaggagcccttccttgcaacagcgggtccattctcacgcagggaacccaaacttactcccaggatatatttctatgccagcaccctgcaagttacaatttgagataataacaatcagtttcaaaaaggcaggaagaattttattacaatcactttttaggcttttacacagtgcaaatgtaaagcacaaagataaagcattttacagataagctttattaggtattttaaaccaacacttcatttgttccagattagcaagtcattagcatgtatcattttcaaaccacccccaccccaccccaacatacaggctgagtgtcaacattcaattcctgttccactgtctttcattctagataaatcggttttcagattctgccaaaagtagaaatcctttaacaattttgttgaaagatgcacttaatcaaaatgaccattctctcatctactcaattagtgaagaacagtatttgagtttagtaaaatattataatttgagactagaaataaggccctatatttaaaaaattccagttataagataccccaatccaacttaaaaatcacttctacgaattaagcaatggccttcactgctacacaggttaaaattaacaactagttcaagtgtaatttatatagagtaaccagaaagattcaaacctggtccaattctctcacactgtctcctcacaccacatggcaccaacaaaaaagaaacagtaataggaataatttatttcctaatgttatgcaaggcactttaaaaagcaaaatgagtcactcaaacctctatagttatttaggaaaccacttaggaataatttaatacacaaaatcataggtgaagaagagctggtataactactcatgacacatctactgcatgtatgatacttttctaagagcagtcatataccatgagaaaacatttattattatttttccctttgcatatgcctgaaccatatatgtacacactaacttatctcttctgtagagatgtttttaaaaatctgctaactgggacttcagaaaaaaaattttcagctcggggttatgtgcaaaaaagacacaggagtgattatattaaaaatacatatacaaatagttaaatatcgaacttcaggaatcacataaaatttaaaaagaatgggaacagcagctatctggcaaatgatatgatcatattcaaacttagttataaagatgaacaaataatttggcaattaaaaagtaactgccacttgtgaaacaatagagatgtctctattttttctgctaggtataaccaaaaaccatgggcattgtatataaaataaacataagataactgaaaaatggaaagaaggtggcagaccagcagcagacctcaagacccaagaaagaacaccaacacagtgggaagttcccagggttttcttttcacttcataatccccagacttggagcttatgtagctggcaatccagtatacaaacagacaaagaccaaaaatgcccccaaaatactgctttgtctagtcaaaggactaggcaacctagaaagatgaaggggtgggttgcccctccacacctgtgggtgtttctcgttaggtggaacgagagacttggaaaagaaaaagacacagagacaaagtatagagaaagaaataaggggagccagggaaccagcgttcagcatatggaggatctcgccagcctctgagttcccttagtatttattgatcatttgtgggtgtttctctgagagggggatgtgtcagggtcacaagacaatagtggggagagggtcagcagacaaacacgtgaacaaaggtctctgcatcatagacaagataaagaatcaagtgctgtgcttttagatatgcatacacataaacatctcaatgctttacaaagcagtattgctgcccgcatgtctcacctccaggcctaaggcggttttcccctatctcagtagatggaacgtacaatcgggttttatacggagacattccattgcccagggatgggcaggagacagatgccttcctcttgtctcaactgcaagaggcatgccttcctcttatactaatcctcctcagcacagaccctttacgggtgtcgggctgggggacggtcaggtctttcccttcccaagaggccatatttcagactatcacatggggagaaaccttggacaatacctggctttcctaggcagaggtccctgcggccttccgcagtgtttgtgtccctgggtacttgagattagggagtggtgatgactcttaaggagcatgctgccttcaagcatctgtttaacaaagcacatcttgcacaacccttaatccatttaaccctgagtttgacacagcacatgtttcagagagcacggggttgggggtaaggtcataggttaatagaatctcaaggcagaagaatttttcttagtacagaacaaaatggagtctcctatgtctacttctttctacacagacacagtaacaatctgatctctcttgcttttccccacaaaagacagaaaacagacaataatacctccattccagccaaacagcacaaaataaaagagcgaccccattcccatcatgccagccaaggttgagaggaacctggacttttgccctctgaaggctgtaaccaggtatcccaacactcccactggggtggaatcagtaaaagcaaaacagggagccaggactttcatccccactaactggtgacaaggccctctctgcagcagtattagtgaagactgaggagcctgggcttgtacccccacctagcagcaacaagatgcctgccccctccccattggggtggtgtcagagcaagcctagtggagattacaactttcacaattggccagtggtaagaagaccagccccatataccacagtgtcagtggagaccaaatgggaagctagaattcccactcttacccagcagcaacaaggagctcctccacccagcttgagtatcaacagaggctaaggggaatccatgacttctacctcaacaaggtaatggccacctacccccatcttttatctttctgcagaaatgtcagagaagttagagaagatccagactttcataatgtaatacaaaaaatgtccaggattcaaatgaaaattacttgtcataccaagaaccaagaaggtgtcaaattgaataagacaatcaactgatgccaaaaccaagatgtcagagatgacagaattagctgacaataatttgaaagcagccaggataaaaatgcttcaatgaggaattataaacatacttcaaacaaatgaaaaatgagtctcagcaaagaaatagaacacagaaataacccaattaaaattttatttttattttttatttcaatagctttaggagtgtaatatagtttggatatttgtccccacccaaatctcatattgaattgtaatcgccaatgctgagggtagggtttggtgggtggtgtttgagtcacggaggcaaatctctcttggcttggttctgtcttttcaataataagtgagttcttgtgagatgtggtcatttagtgtgtgccccctcctaccccctttcacttgctcctgcttttgccatgtgaggtacctgctccctttttgccttccaccatgatagtaagctccctgagcctccctagaagctaagcaaatgccagcatcatgcttcctctaaagtctgcagaaccatgagccaattaaacctcttttctttttaaattacccagtatcaggcatttcattacagcaatgcaagaacagcctaatacagaaaactggtaccaaggagtggggcattgctttaaaaacacctgaaaatgtggaggcagctttggaactgggtaatagcagaggttagaaaaagtgtggagggctccaaaaaagacaagaagatgagaaaaagtttggaatgtcttaaagactggttaaatgattgtgaccaaaacgctgatagtgatagggacaatgaagcccagcctcagatggacatgagaaacttactcaaaactggagaaaaggtcatgtgtgttatgccttggcaaagagcttggctgcattctattcatgccctagggatctgtggaagtttgcactacagagtgatgacttagggtatctggcagaagaaatttctaagccacaaagcactcaaaaagtggcctggctgctgcttccaacaatctacacccagatgcaagagcaaaggaatgactttaagttggagctttaaagggggggcagagcataaaagtttagaaaatttgcagcctggccatgtggcagagaaagaaaaagctttctgggggagaattcaagcaggctgcggaacaactacttgttagatacttgcgtgactaaaagggatccaagtgctaatatccaagacactgggaaaaaggtcttgaagccatttcagagctcttctcagcagcccctcctatcacaagcccaaaggcctaggagggaagaattgtttgggtggccaggacaaggttcccaaagcctgcacaacctcaggacagtgctccccacattctggctgctctggctccagctgtggctcaaagagttgcagatactgcttgtgcctccaatccagagtgggtaagccaccataggctttggcagcttccacatggtgttaagcctgtgagtgcacagagcgtaagagtgaatgaggcttgctactctctacatagatttcagaggacatacagaaaagcctggatgtccagacagaagcctgctgtaggggaagagccctcatggagaacctctactaaggcagtgcctacaggaaatgtggggatggaactcctagagtccccactggagcattgcctagtggagctgtgagaagcaggtgaccaaactccagatctgagaatggtagatccaccatcagcttgcaccctgagcctggaaaagccacaggcactcaacagccagtgagagcagctgcaggagctgaactctggaaaggcacaggggaagagctgcccaagaccttaggagctcaccccttccatcagtgtaacctgggtgtgggacacagagtcaacggagattattttggagatttaagatttcatgacttccctgctgggttttaaacctgtatgaggcctgtaacccctttcttctgcctggtttctcccttgtggaatgggaatgtttacccaatgcctatagctccattctatcttggaagtacataacttccttttgacttgccttgttcagatgagactcagatgagattttgaaccttaaacttttgaactaatgctggaataagttaagactttaggggactatcaggaaggcatgattgttttttgcaatgtgagagagacgcgagatttgggagggtccggggcagaatgatatagtttggatatacatttttccctgcccaaatctcatgttgaattgtaatccccaatgctgaaggtggggcctggtgggaagctcttggaccatgggggcagttccctcatggcctgatgctgtcttcatgatagtgagtgagatcttgtgagatctggtcatttaaaagtatatgacacctgcagtccctctatctctcttgctcctggtccagctaggagctgcaatgtgccagctccccctctgccttctgtcataatagtaagcttcctgagacctccctagatagaagcagatgccactagaagcagaagccactatgcttcctatatagcctgcagaaccattagccaattaaacccctattcctatgaactacccagcctcacatatttctttatagcagtgtaagaacatcctaatacagagtacacatgctttttggttacaggatgaattatagagtggtggagagtctgggattttagaatatccatcaccaaaatagtacacattgtacccaacaggtactttttcatccttcaccctccttccaacctcgcctattctgagcctccaatgttggtgataccagtctgcaagcctctgtatacctaaagcttagctcccacttgtaagtgacaacatgtagtatttgattttccactcctgagttacttcctgtagaataatggcctccagtttgatctaagttgctgcaaaagacattatttatttttcatagttcattattttctgagtagtatttcatgatgtgtgtatatgtgtgtgtatatatatatatataaaacacaaaaataaaaattttagaactgaagaataattaaatacctcaatgataagttcaacagcagaatgaaaagaacagaggaaagaaacagtgcatggaaagacagaacaataaaaatttaaaaattaccctatctgaacaatagagagaaattaaactgaaaaataaacgtaaactgagcttcagggacctattggactataagaaaagatccaatatttgtgtcattacagacctggaaggagaggagaaaaaaggtgaggctaaaaaggaaataatgactaaaagctcccacatttggtaagacacaataagcccacagagtcaagaagctgagcaaactccacacaggataaactcaaatgaatccatgaaatgatatatcataattaaattactgaaagctaatggcaaaaacaaaaaaaaatattgaaagcatcagtgaaaattttacaccttagccattggagagaaattgtgattgacagcatcagaaaccatggatgccagacaaaagaggcccagtattatttaagggtggaaagaaaagaactgtcaatccagaatcctatacctgataaagatattcttcaggaatgaagaaatcaaaacattctaagaagaagagaaactaagataattagcaaccagcagatctactctaatggaatgggtaaagaaagttctctgaacaaaagagaaataataaaagagggaatcttggaacatcagaaaggaaaaaggggcaaaagcaagcaaaaataccagtaaataggctttccttctcctcttgagtttaaattatgtttgaaatttgaaatgaaaatattagtatcgtctaatgtggttctagatgtacataaaggagatatttaagacgattataaaaagaagaaaaagaaattgcagggagccaaaggcttgtgggacgtgaccaactcagcattccactggaggctatatgatcaaacaacaaactgtttttcatgaatgcaggatgtgggcaaactcatgactgctcctgctggcagaaggtttgctggaggcaatcactccctggtgctgaggttatctgccgtgacatctacagcctgttgttcgaggactgcattcttgcaagcctactctggaccaggcagctgaccccttctttcatcccccttctcactatctcttttgcctaataaatatggaagactgtgtaaagctcagggcccttgtccactagaggcaaggtgccccctgaccccttcttccaaatatactcttttgtctcttgtcttttattcccacattcacccggctttgtttggtccccctaggtctgtgcgggttacatagtggtgccccagtcagcgacagaatcgggtgctccacaagagatgtaaaaaaagcagagtttctctacttcacttgaactggtgaatgaagacaccagtaaactgtgaggctatgtacatatattacctgaagcgatcactaaaaaaatagctacacaaaaagatatattcaaaaacaaatgaaactatgaaaactgctcaggtaatccacaggatggcagaaaaatgcaaatcaagaaataaaaagcagaacaaacagaaaacaacaaataaaatagactaacgactaaacatcaataattaaatgtaaatggtctaaagacattaaaagacacagattgggagagtggattaacaacatgactcaactatatgctatctacaaccaaatttaaacagaataatataggcaagttgaaagtaaaatagtggaaaaagatatatcatgcaaacattaatcaagggaaggcaagtgtggttatattaatgtcagataaggtagactttggagcaaacaaaattaccagagacagataatgacattacataatgagaaatatgtttcaccaaaatgacaacatagcaatcctaaatgggcatacaacaaataacagaactgcaagatacgtgaagcaaaaactaacagaactgaaaagacaaacatatccatacttgtgcttagagattttagcaaccctatctcaaaaattgacacaattactaaacagaaaatcagaaagaatacagaaaaactcaataataccacctaccaatttgatctagttgacatttatagaatgaaatacccaaaaacagcagaatacatattcttttcatagggccactttacacataacaagacagaccacatcttgggccatgaaacaaacctcaacaaatttcaaagagttgaaatcatacacagtgttttcttacaaccatggaatcaaactaggaatcaacaaaaagataacagtaaaactcccaatacttagaaactaacacttctaaaatctgcatgggtcaaagaatgaaaatacaaaatataaaaatatgtggaacacagctaaagtaatgccaagagggaagtttgttaacattaagtgtgcacactagaaaagaggaaaagtctcagatcaataacctatgctttcatgtggaaaacatagaaaaagcaaaacaaacccaaaacaagcagaaggaatgaaatcataaaaacaacaaaaaccaaggaaattgaaaacagaacaatttttaaacatcaatgaaacagggttggttcttaaaagagagagaacaaacgaactaccagtatagattaccaaacagagattatcactacagaccctgccgacatcaaaagaataaggaaatactacaaaaaattcgatatatgtaaatttgacaacttagaagaaatggtccaatactgctaaaagcaaaaactaccaaaatttactctatataaaataggtcatttgaatagctctttacctattaagaaaattgaattcataattttaaaaattccaaaagataaatctcctggcccagacggtttcattggagaaatctattaaacatttaaagaattaacagtaattctacaaaatctcttttagaaaataaaagagaaaaaatacttcagagttcattttatgaagctaatattagtgatacccaaaccagacaaagacgggagtacaaaaaaaacaaaactgcagacaaatattctttatgaatatagatgcaaaatttcctcacaaaacattagcaagtataattcagcaaaatataaaaagattatacactatggcaaagtggtatttatgccattgaggcaaggctggttcaaaatttgaaagtcaaccagtataacctatcattatttttttttctaataataaaaatcaggtgatcatctcaagaaatgcagaaaaatacttgataaagaatttgataaagaatatccataaaaaaacttgataaagaatattcataaaaaacctagttaacctcattcttaatgatgaaatattgaatacactccccataacatgaaaaataaagttaagatatctactcttattcaaaatagtgctggaagttctagccagtgcaataaggcaagaaatttaaaaaaaaaaaaaaaaaaaaaaaaagcttactaatcagaaaaaaaaaaacaaaaaaaaaacgcaacttttgatacttatagataacatgattgtctacatagaaaatcccaaggaatctacaaaaacacttttataactaataggtaacattcagcaaggtcaaaaaatacaaaatgaacatacagaaatcaattatatttctatatactagcaataaacatatgaacattgaacttaaaaatatagtatgacaatctaataataacaagcaatggagaaaaaactccctattcaataagtggtgctgggataactggctagccatatgcagaagattgaaactgaactccttcctttcaccatattaaaaaatcaactgaaaatggattaaggacttaaaagtaagatccaaaagtataaaaaccctagaagaaaaactaaagagctactgcagagtatcagcagtgtaaacaacctacagaatgagagtaaatatttgtaagctatgcatctgacaaaagtcttaatggctagaatctataagaaaaaaaaacaggcaaaaaacaaacccatttaaaaatgggcaacggatataaacagacacttctgaaaagaagatatatgcatggccaacaagcatatgaaaaaatgctcaatatcagtaatcattagagaaatgcaaataaaagccacaatgagataccatcttacaccagtcagaatggccataattaaagtcaaaaaatagcagatgttggtgaagttacagaaaaggtcatgcttaaacactcttggtggtactgtaaattaattcagtcattatggaaagcagtttcaagatttttcagtgaacttaaaacacaactaccatttgacctaacaatcttattactggatatatacccaaaggaatataaatcattctaccaaaaagacacacaaactcgtatgttcatcgcagcactagtcacaatagcaaagatatggaaacaacctagatgcccatcaagggtggactggataaagaaaatgtggtaaatatataccatggaatactgaggcagacataaaaaaatcatgtcccttgaagcaacatggatgcaaatggaggtcattatcctaagcaaattaacactggaacagaaaaccaaatactgcatgttctcacttatagatgggagctaagtactcagtacacatggacacaaagatgagaacaacagacaacagaagctactttagcgggcagagagggaggtggataaaggtcaaaaaactacctattgggtactatgctcactacttgagtggctaaatcatttgcacatcaaaccccagtgacatacaatttacccatgtaatgaacctgcgcatgtacctcatgaatctaaaataaaagttgaaaaaaaaagtacaaaacacaaacaacaattgtatgctgaagactacataatgttgatgaaagaaatcaaagatctaaataaacagagaaatatgttcacagattggaagactcaacataacaaagatgtcaattcttcccaagtttatatacgagtttattaaaattcctttcaaaatttcagcatcatttcttgtggatataaaattattctaaaatttatattgaaaggcaaagaacttgggtagctgaaacaattttcaaagagaccaagtgggagaaatcactctatttgatttcaagacgtaaatacagctacaggtattagtgaagaaacaggacactgatcagtgaaacagaatagagaacacagaaatagacctatacaaatattcccaaacaatatttgaaaaaaatgtaaaaccagtttattggaggaaggacagtcttttcaagaaatggtaaaggagcaactggacatccaaaggcaaaaaaacgaaccttgacctaaacctcacatcttacagcaaaattaactaagaactggattacaactttatataaaatgtaaaactataaaaattttagaaaaaaataggagaaaatatttggaaatctacagctaggcaaagagttcttaaacttaacactgaaatgctcagtccataaaaggaaaaattgatgaattggacttcatcaaaaataaaaactttgctctgtaaaagcccatataaagaagataaaaagactagctacagcgcagcagaaagtatccgcaaaccacatacctgacaaaagactagtacctagaatatatatagaactcccaaaactacagtaaaaaaggacaaacaatccaattagaaaataggcaaaagtcacaaatagacatctcactaaagaggatagaagaatggcaaataagcctatgaaaaaatgttcaacaccgttaaccactacagaaataattaaaaccacagttagtactacacacctatcagaatggctaaaacaaaaaatagtgaaaacaccaaatgctttcaggatacgaagaaactggatcacttaaacattgctagtgggaatcgaaaattgtataaccactctggagaacagtctggaagtttccttaaaaaactaaacatgcaactgccataggacctacaattgtattcctgggcatttacccctaagaaataaaaagtatcttctcagcaaaatctgtacacaaatgcttacagcagctttactgataataggcaaaaactgaaaataatctagatgtcctccaatgggtgaataaacaaactacagaaccaccacacgttggactactacccaacaataaaaaggaacaaattactggtacatacagctactgggatgaggctccagagaattgtgttaagtgaaaaatgtcagtcccacaaggtcatatcccaaaaggaatgtgatttcatttttaaaacttttttgaaatgatgaaataacagaaatggaaaacagattaaggtttgccaacagttaaggaagagactgatgggagaggaaagtaagtgagtgtggctataaaagggcaaccagaggaatcgctgtggtgatggacgtgctcctcagcctaactgaatgtcagcattctggctgtgctacgatactgtggtttcataagatgtcaccactgggccaaactggtaaagagtgtacatacaggatctctctgtgttatctcttacaacagtagtgaatctacaattacctcaaaataaaaagtaattaaataaaagcaactgagctttgactgttataaaattgtttataaagtcataattttaagagcctaaaattctctgaaagttacagtaaattgtgagatttattatttttcttactaatctatgttttgaaaatgctacgtaagaaccttgtacaattgagcttgcatgacttagtagatataaatgtctgaaattctttgaagaaagagaataggagtctgcacttacatcttggtctcatattttatatatttatttacaacttaaactcaaactatttcccaaaaagagctcatcatatcttgtcaccatgtaaatccaagttcttcattaaaaatgtgcgtgctgtgcctcatgctacttcacatggcagcacaattttctgatggagtctccttatggtgagtgcctgtgatgaaaacacacagctgactgctttaagaagtaatgtaccttttccagtatcagggacagcctggagctgacattagatatagtctaaatatttaataacttccatttaaacttgaattcgaaattcataaaatacaaaacaatgaccgttttgagctattttctcacatctaaaagtaacattcttaaaaaagaatgacttgacctcagaaatgcaaaagcacttttcattaccacaaaagaatatcagagatcaactttgctcagtatcttggggaaaaaagatcttattcaagaaagaagacacagatcttaggaaacaaatactactgcaatgtgaagatagctagtttcagtctagtgctaaattgaaaacaatgaatacagaccactacgttggaaagtattaaaagaaaaagatgactgcaccgagaagaaattaatattaaactaacacattttcaagaataggctgaactattttttacttcagggtaagattcctaagttgtcatgctgtgtacataaataatcagccttccaagtacaggcataccttggagatattgtagtgtagtttccagaccactgcaataaagcaaatattgcaatagaatgagtcacatcaattttttggtttcttaatgcatataaaagttatttttatgagagaacaaggcaggaggatcacttaagcccaggagtttgagagcagcctggctacatagtgagactctatctctagaaagacataaaaatattagcctggtgtggtggtacgtgcctgtagtctcagctgctcaaaaggctgaggtggaagaatcacttgaccccaggagattgaggctgtagtgagctaggactgcaccactgctctccagcctggttgacagagcgagaccctgtctctccaaaaaaaaaaaataaaaaataaattaaaaaaaaaaaaggtatgtttatataatattgtagtctaagtgtacaaaagcactatgttttaaaaaaaagtataaaccttaatttaaaaatactttattttgctaaaacatacaaggatcatctgaccttcagaaaatcataatcttttttgctggtggagggtcttgcctcaatgttgacggctgctgactgatcaggatagtggttgctgaaggttgggctggctgtggcaatttcttaaaataagacgaacagtttgccgcattgacccctcctttcgaaaaagatttctcagtagcatgtaatgcgatgttatgatagcattttactcacagaagaatgtttttcaaaataggagttgatcatctcaaagccctcctctgctttatcaactacactgacgtactatgctaaatcctttgttgtcatttcaacaatattcattctctttaccaggagtagattccatctcaagaaatcatcttctttgctcatccgtaagaagcaactcctcacctgttcaagttttgtcataagattgtagcaactcagtcccatcaccaggctccacttctaattctggttctcttagtatttccactcatctgcagttacttcctccactgacttcttgaccctcaaagagtttgggagtgttggaatcaatttctcccaaacccaatgttaatgttgacattctgacctcctctcatgagtcttgaatgttcttaatgacatctaagtggtgaatccttcccagaaggttttcaattgactttgcccagatccatcagagaaatcactatcaattgaagctatactttatgaagtctatttcttaaatattaagacttgaaagttgaaattactccttgatccatgggctgcagaatggatgttgtgttagcatgaaaagaatattaatctcctcgcacatttccgtcagagctctcaggtgaccaggtgcattgttcggtaagcaatattttggaaggatttttttttttttttctgagcagtgcgtctcaacagtgggcttgaaatattcagcaaacaatgcaataaacggatttgctaccactcaggctttgttgttccatttctagagcacaggcagaatagacatagcataattcttaagggccctaagattttcagaattgtaattgaccactgattcaagttaaagtcaccagtaagagaattggcctgtcttttgaagctttgaagccaactaatgacttttctctagttatgaaaagtcctagatgcatcttcttccaatagaaggccatttcatctacactgaaaatctgctgtttagtgtagccaccttcatcagtgacttcagctagctcttctggatagctttccgcagcttctacaatagaaactactgcttcaccttgcacttttatgttacagagatgacttctttccttaaacctcatgaaccaacctctgctagccaactttttcttctgtagctcccttgactctctcagccttcacagaattaaaaagagttaggaccttgctgtgtaggcttatgcttaagggaatgttgtagttgatttaatcttctatgctgacaactaaaactttctccatattagtaataaggctgttttgctctcttattcatgtgtttggcttttgatgtgcctttctcactaggcttaatcatttctagactttgtttaatgtgagggacatgcaactcttcctttcacttgaacacatagatgtcattgtagggttattaattggtctcctttctatattgctttgtctcagaatagagaagcccaagaagagggagagagaagggggcatggctgattgttggaatagtcagaacacacacaacacttactaagttcaccatttttctatggtgatgcagttcacatcaccccaaaacaattacagtggtaatatcaaagaccactggtcacagatcagcataacaaatataataataataaaaacatttgaaatattgtgagaattaccaaaatgtcacacaaaggcataaagtgagcaccagttattggaaaaatgaggccaagtagacttactcgaagcagggttaccacaaaccttcaatgtataaaacattcaatatctgcaaagcacaatacaactaggtattcctgtactcaacagtggcatttcattaaattctatcttccatagaaagtaaagttttccttcaaagcctagaatgagtaaatacaccaaacagtcagacatttaagatttcttttataacaccatgctgaacaaatcttatgcctgagatgttaatatcctcattcatgcagtccacagaagtgtcacctttttccctcttttctatcacaatattaattggtagaccatatcctaaggaagagaacagaaacatttaaggtgggtgaggggaaatgtccaaacacaaaaatgtagaacacatttctctagtgcaaggggcttgaaatgataatgagaccagtcaacccagatgcatttaaataaagtcgatctccccacatatcttatttaaaccagggcatcaaatttttaacaataacaacttcccaatgtgtccccatactagcaagactactctatcagccatctcagaacagcccagcacaaaatgcacatacaaagctgccatgaaagttaaaaaataatcctaaggatctacaactgggtcaaagggctttaaagcattcagctctcttaagcttttgtctaactgcatgggtgctgtggaaggaaccttaagtatctgagattctatgattctaatacaaattacatttgaataaacctaagcagttctcaagattacctaattttaatattctcgtagaaagaatgacttaaaatctgacaaactgacttatgacagtttagctacaggaaaaaacagtctatttcattaatcaacaaaaagcattagctctccataaatcttaatcaaatcagtaatacaggccaagcctctgagtgggcttacaaaaacctggaatatcggaaaactaaagaactcgcttgactttcattataaaacagaagacaaacacatagacgaagctgtaagaaagaaagacctcattgtctaatgataagtccttgagtacatgaaagcagtaactgcagtaaacaggcaaagccactgaacttatccatacttgaagggtacagacaagcctctgggggcactagagaaggcaagatgactccatacactggaatgctaccagggtggactagaaatgactgaacagtgagtaattttgtttctgattctgtatgtgtctgcctgtactttgaatattttctacaataaccattgtttttttagcatcagaaaaattataaatagaaaaagaattgcatattgaagaaaaaacagatttttacacaaattacgtattcttatcaatttaaaacataaagccattacctaaagtgaacagattttctaaagaaagagaagcccaaccataagtactattaataccctgcacatagtaggtactcaatatatctcttaagtgttaggtatagattactatcagataagctttaatttactcataagctagtgctccatatattcacaccagagataccatttgattcctcaattctcagaaatgtcctctgttagtaaatttacagtcatttttacactcaactatcagaatttgataggttatttatgacactctggcaattacattgtaatttcctcaccaatctaagaactcttatctactatacaatttataatatgaatgttatttttactctgccaaaaaataaagtgtttttattgcagtgatttatcctgcacatgtgttacttatacatacacatctattataaatcaagtattggagaggagaaagaacaaaattaacaaacataaaacaaaaaagggagtgagatgatgtactagtgaacagcaggaaattaaactcccagccttgcttccattaagaagttttgacaagataaagatcaagaacacagcttaagcagttagtgaacagctgcacaagtcccaaaatgatatatgatttttttgcattacaagcttcattgctaacttgtagcagttttggtaaatagttgaataggtacaactaaatttgacacattacggaaatatacaagaccaagatgaacaattgtaaagtaatctgaacttaggaattactccaaatgaacaaaaagattataactggaaaagttatttttaatagatattgaagatatctattaaagcagataatagttatctattaactattatatatttaatattaatctttcaacattaacgttttcaaaagtatactgtgtcaagacacaaagtgtagcatttgtgacactcagcaaacttttagagaattaagataatttttgataccaatttcaagtaaaacgcccttcaccatatctctcacaaaaataagctaaatttaaaacaaaaaacaaacagccatgcactaagatatcacaatatctatgagataagagcaagtaacaaactaaaaaatactgaaattaaaaataatattgttgggaatcttttttttttaattctagaaatttgacatcctttccataaatcacctacgatctgtatagtttgcttcttcctcatggtcttttttctatacagccctgtaagtatcttcccaacatatacactgctacaaagaaccacaagtccacttactcaaaaactgggtcaactccttttaagcttccaatgcctttaatgtttcaaggcaattcaataattcatttgaagtgaaataggttgaaatcacattcttggagctttgacaagaacagtcatttattgtttacttaatcatgtcatgcatgagagtttggttgtgtcttccatacccaccttccaactcaatggagtcaacactgcactccattatgccacataccacaaaatggtcaggacaaacgataacagtgtcaccttcatagcaggcatttataacagataatggatcaccgaagaactagaaaacaacaacatatttgcaaatatacacccacatatggtgtggatctctgtccccaaccaagtctcatgtctcatgttcaattgtaatccccagtgttggatgtggagcctagtgggaggtgactgggtaatggggacagtttctaatggtttagtaccatccccctagtgctgtctcatgacagagttctcatgagatctggttgtttaaaagtatgtagcacctaccctcattctctttcttcctcctcctccagccatttaagccatgcctgcttccccttcaccttctgccatgattgtaagtttcctgaggcctcccctgccatgtgtccttataacctgcagaactgtgagccaattaaacctcttttctttatcaggtatttataggcagtgtgcaaagtgacaaatatacaaccccacaaagcaactcgagtattattccaagtgccttcatgtctcactctgaaaatggagccaacactgcacgctgaagcatctcctttggtagtggactgaacctaatgcatgcctggtaagtggctactgctgatgaaaggcagggttctcactacttcctatttaacagaaaaccacctctgggaagctctgtgtagaattcatgaaaacctatggtgaatcagaaggaaaaaagccacttgcagcaagacactcttcttttacctgaatttctatatcttcccccaaggcacctggcaaagcctgtccatgagtagggtccacagcagaccagtcatcatggtggaggagatctcatgggtggaacttctgacaactggatggacaccctttgcttagatgttagaattctgataaccaaacacataccatgaagaaaccaaacagacctaacagttctcagtaagatagcaaggaagaaaagatgctaactagctaagaattacaaaggcacacatacctcaacaaaggactctccatgagttttagcttttgcttcacctgttcaatctctgaatacaattttaacccttcaaccatggagatattttcctgctcagagctacaatttgccaaactgcttctcagattaaaaaatttgctgtaactctcctcacattgagacaacagattgtggtagtcacgtcctgaaggaactcagttttcaagaatgtcataatccctgagagtttaaaagcaaactgaaatccattgcctttcagacacattttttctcattaagaaagcccatggagtcctcaaagacccactaagaaaagtgctttataactcaggtacatgttaagtctctctgaatagtactctaagtggtaactgttgaaagtttcaaacaccacttcattgaagtcattaatttttcttcttttgaggaattgttttttcttagatccaaacatttgtgctttagaattacctaaagttcatattgtacaatttgtaatcattatttaataagaaattattttcttctcatatattagattcaaaatcttaataaggagtgggtggcaagggccaactggggagtaggggtatagagggaagtaaattgtttcacaatggttaagactgccatgtttttcagagatctgaatgtgattttaaaatgttttaaaagattaccatatttataggatcaaaaattagaaatgactcaaactgtctagtccttccttacatttaaagcactatataggcacaaaattatgttgaatattcccagagaaagaccaggggatttcaaaaaaataaacctttgagattttgaggggaaaaaaatgctgtcattattagagaatgattaacacaaaataaccttgtactggaccaccttactggcacttgaaatttattcatttacataaattctcaaatataatgacagaacaaaaagtatgtctcaatgtaataaaataatttataaatgtacagtcaatagatattaaattaatgggtttaacaataaaataaaatattgccattacctgtagttttaaaataattgctttatttttcagttaaatgtatatcaactagctgtgccttaggttagagcttctcaattctgatgaatattagaatcacctaggatctttcaaaaatacagatgctcaggccaacatccagagcaataaaaacgggcctctgaaagtggagaggtattttttaaagttccccaagcatgtaatgtgtagccaaggttgagaactattgtcttagattattatttttttaacttcgtcatgctcttaagaagatggggggaggggagaaagctgaacaaaatcctaattcatatcaaattatggtgaacactcaatatttaaaatgaacagaagattttattttcttgcttttccaagtaaatggattgggtaaagcttgaaaaagtaaggattttgtctactttggttatccacactcatttaaagatactctagaaatctactttgcaaataagaaattacgaaccaaaccactggtctattaagttgcgaagattaagactaaaattttaaaataagtttcttagcatttccaatatccatgcaagttagcttatttcttctcattagattgatactttacagtctagaaccagtgaaccaacatcatcttcagacccctaagttctgaagtagtgtgttttgaattagaaaggaaaaatatttgccacatggtgcaaaatcaagacagtgatttgatcttgcctgctgatagctctactcctatcttagcccaggaacctttttagagtctgcatacatgtgataacattccagtttctccatcaagtgccacagtttcttctccgtaactaaagacaattcctcccttatgctgtcccatctgccagtgatgtacaaggcatgtatggagatcattacttgtccacacatgcaaggctctcaaatcagaatacaattttttttgtccacatacagatcaaatttgccagatatgcattatatttacctaccattacattctacttcaatcaaaaccaatcactgctctttaagagcaagtgtatcaaacctagaaaatattcaagctttttgatgttctgggattgtactgaacacactatagaaaaataggaaatgcacaatagaaaaattagaaaggtagaaatcacagtcaacttatgaaagctgaaatcagacatacataattgtaaaccaggtagaaccattaaccagattttcattttttaaaaaattttgttattatttactatttaaaccaagagaaacttactaaatcaaatcaaactgcatgaaaatgtaaaggccttgtcttatataatgtcaaatcatctttcacataggaaaaacaaattaccttctacaattctttttagtgtgagttctaattttattgcagcattgcctgttaatttactgctcaggaatacaggagaaaattactggtcttacagcaccatctagtggaaagataagtgtcgcatgtaacaagatcagcatagaacaactacttaatttaggttgcatgattaattttggtatttttgaacggaaaagcttttccttgtcaaaatatgataaattagaagaatgcgtttaggtatttttgattcatctgttagtttaacctagtatgttttactataggaacttagagtaaagccatatactttaaaaaaaaagtattatttaagtttcaagcaaaaaagtctctataatgcaaataagttctttgtttttcaaacaattgtcattaaatagatgttcacaaacctcctgattttaggcttagtttataaacagttaaagcaggtttctctgcacttgttcgtttcatttaataacttgaaaaggggctgcactatttgtatattggtctatttctgtctataggcccttggagtaagagtatgtgcgtgtgtatgtgtgtgtgtatgtgtgtgtgtgcgtgcattgcgcatgtgtgtgtctcacaaaggtaaaattaagccatggtaactattttttcaatatgtacaaggtcagtaataaacacaatctcaattgaggtttaacacgtctgacaaaacaatcatatgcatcatccttttcttcatcccaactcttccaaatgttctggtagaaaaacctgaaaaataacttaatatcattcaaatttaatcactggctccaaatgttaggattctggagggatgagagctaaagaataaatcaaagcaattctcatatctcagagaatgctgcatatttgctatggttatcagttgagtcacacaagataaagaccttctttgaatcagctagaggggtttttctataacactcatttttttaaaactttctttttatcagaagtagtatttattgaccatctctaactgggcaggtagtagttccatttgttgagatagaaaacactgggagagaaacaggtttggggttcaaaatgaagagttgtgtctttgccatgttcaggctgagatgcctatctgacctcccagtaatgacgtcaaatgtacagagaaatatacaagcccagagatccagggaaaggtcagggctagagacataaatctgggaggtgtcagcatattaatagttttaaagcagtaaatgagatcatctagggacataatataaagcagcagttctcaaccctggttgcacattagggtcccccgggatactttaaaaaattgattccctatcccagaccaataaatcagatatctgcggagggaagggggttagcattcacatgttttttaaagctctctaagcactttaacaaatttttattacaaaaaattctaaacatacaacagataaaatagtatcatgaatatcatgtatccatcagccaacttcaagaattacccacttgggagaaatcttatttcatctctacctcaccaacctaccctctgctcctctcctctcatcatcctgaccctggcttattttgaagcaaatctcagatgtatcaaatcattcacaaatttttagtatgtagctctaaaataaatccttatgccaaaaaagttttaatttcttaatattaccaaatatccagtcagtactcaaattttcctaattttctcttttgctgttgttgttttacagttgacttgttcaaattaggatccaaacaaggccagctgtggcccttaatggatgcgtctcttaaatcacttttattctatacattaccccttgctctttttacccttgtaatttatttaatagtttcacacacactgaattttgttgattacttatccatggggtcatttaacatgtttttctgtttctttcctttctagtaaactgatagtaagatctagagcttgatgggcttcaggaaagactttttggcaggaatacttcaagtgaggtatgatgtacttgcatcgggaagcacatatagcaagtcctctaatatcagcctttcattgaatgcctttcactatataagggaataaacatcaattcctggccatagtcgcagtctgtgtggagttttcatgtttttcctatgtctgcatgggttttctacaggtactctggcttcccacatcataaagatgtgcatacgaaagatgagcatgctagctgaactggtgtgtcgacatcgtcccagtctgagtgtgggtgtgagtgcaccctgggatgaagtggcattgtgtctcatgctggttcctatcttgcaccctaagctgccatgataggttttggccacctgcatccctgaactggaataagcaggttggaaaatgaaagaatgaatatgaattattgtcaaataaaaaatcttaaattagacaataatcatacaaatgcacaacaataaacaatgcagtataaaatcactcagcgagtccatcaagttggtgacggtttgaaccacgtggtggtaaagggtactccttacaatttttactttgccgacatttattcctcaatttgaccaaccaccaccatgactgccgtgactcactgattcaccaaaaattgggtaaataattattttgtttttataatctttcttatatgtatacaggattcacatttatttcaatgttcaagattaaaattgtttttggtctttatttagaagtttggtgatgtttttgtgaccagaaataggccataggaactttaacttttgtttgtatctattagcctatggtaacattggttttgtaatttcgcttaaagttgaagtttccaagaacctgtcgacaacagtaagtgaagacttctataacgcctagccatctctttttgtgaggttaagactgatcaatggattcaggtgttgtcagcctgattcacccactatgaagttctctattagtttttcacctaaagattacagcagtcattgaggatcactgcctacaacctttatttcattagtggttacaaaatatggatattctatcattccttcttcatgtagtggttggatgtgtctataaggaaaatccccaagttattataatgtggttccaaggtagagtagatgagaaaaagaagagtaataggattgatcccttggtaactcgaacactctaaaaagttagagcatgagagaagagctaggcaagatgactagaaaaccaagccggtgagacaccaaatgaatagtgctgtcgtagaggctgagaggagagtgtgttaagatgggaatggaggaggcagagcaaggtagtggaaaagaaggctcctctgatcattctctgtgcaaggacaccaatttaacaactatccagttctttggtaagaactaaaaatcacgtgagcacctatagcacctggttttaacttcatatcactgaaaagaggcatggaagagatagaaaaaacagtcttgaatcgccgatgccacccctcacccaccatcctgtgtggtacagagagcatatctgggtgctgcaggagggagagcactgcaattgtaaggcattaaactgagctgtcctgccacagcagaaaggaaaactagaccaaactcagctgacactcacctatggaggcggcatttaaaccagccccagccagagcggaatcactcatcccagcagtccaaacttgagatcctgcaaaccttgccactgagggctaaagcactttgtgtctctaagtaaacttgacaggcacactaggccataaggactgcgactcttaggtgagtcctagggctgaactgggcccagaaacacagagacacagtggacttggtgggggcacacaacctactgagacatcagctggggtgtctaccggagtgctggcatcacccctcccctaaacccagactgcacagctcacagctctaaaggagaccccatccctccacttgagaagaggagggggaagagtggggaggtcttcatcttccatcttggataccagctcagccacagcaggataggtcaccagccagagttgtgaggcttccccatgccgcattccaggccctaactcccaacccccaatgacatttctagacacatcctgggttacaaggaacccactgctttgaaggaaaggacccagtcctgccagcattcatcgcctgccaactgaagaccccttggaccctgaataaccagcagctatacccaggtactacgtcaagggccttgatgagccactgagacttgctggcttcaggggagactcagcacattcccagctgtggtgggccacaggccaagtctccttcagcttgagaaaagcagagggaaaagtaaaggggacttcgtctctcaccttaggtactagcacagccacagcagggtagagtacccagcgggctattagtgtccctaattctgggacttgattcttgaatggcatttctggacctgtcctgggtcagagggagggaagcccactgccctgaagggtgagtcccaggccaggcagcattcaccaccaactgagtcgagagacctggggccttacaggaacatcagcaatagtctggcagtagtccttgtggcctgggatggtggtagctacagggtgaggctcctctgcttttggaaagcggacagaagagtgggaaggactgcatcttgtggtttgagtgtcagctcagccacagtacaacagaacaccaggtagacgtctaaggctttgactctagtccctgacttcaagatgacacctctggatccacctggagcctgggggacctcatcaccctgaagggaaggacacaggcctggctggctttgtcacttgctgactgttaagccccaggttcttgagcaaacataggcagtagccaggatgtggttacagtaggccttgggtgagactcagtgctgtgctggcttcaggtctgacccagtgcggtcacagtggtggtggccacaggggtggttgtgtcactccaccctcaactttaggtgactcagaagagaaactctgcttgggagaaagtaagggaagagaacaggagtctctgcctggtaatccagagaattctcccggatcttgctcaagaccatgaaggcagtaccttcgagtcttcaaacattcaaaaaaactgagataatatcaagcatcttctctgaccgcaatagaataaaactagaaatcaataacaagaggaattttggaaactatgcaaatacatggaaatcaaacaatatgcgcctaaatgaccagagagttaatgaagaaattaagaagaaaattgaacaatttcttgaaacaaatcataatggaaatacaatatagcaaaacctatgggatacagtaaaagcagtactcaaaggaaagtttatagctataagtgcctacatcaaaaagaggaagaactccacataaataatctaacaatgcatcttaaagaactagaaaagcaagagcaaaccaaacccaaaattagaagaaaataaataataaagatcagtgcagacataaataaaactgaaatgaaaatacaaaacatcaatgaaacaaaaggttgttttttaaaaagttacacaaaattgacattgccaaactaaaaaaaagaaaaaaaaagatacgaataaataaaatcaaaaatgaaaaacgagacattacaactgatattgcagaaattcaaagaatttgattcctagtatcattgttggatagtataggcaactatataccaataaatcagaaaatacagaagaaatggacaaatttctagatatatacaaccaatcaagatttaatcaggaagaaatctaaaacctgaatggaccaataacaagtaacaatatcaaagctataataaaaaatctccaagtaaagaaaagctcgggactgatggcgtcactgctgagttttaccaatcctcctcaaactattccaaaaaatagcagaggagggaatacttccaaactcattctacaagaccagtattaccctgatatcaaaatcagacaaagacgcatcaaaaaaaagaaaagaaaagaaaaaaaagaaagaaaactacaggccaatatctctgatgaatacttattgaaaaattctcaacattaccaaaccaaattcgctaatatattagatcattcatcataacaaaatgtaatgtatccccatgatgcaaggatggttcaacatacacaaatcaatgtgacatatcatatcaacagaatgaaggataaaaaccatatgatcatttcaattgatgctgaaaaggcatttcataaaattcaacatcccttcatgataaaaactctcaaaaagctgggtatagaaggaacatacctcaacataataaaagccatatacagcagacccatagctcttatcatactgaatgtggagaactgaaagtctttcctctaagattcggaacacaaggatgcccactttcaccagtgttattcaccacagtactataagtcctagctacagcaatcagacaagagaaggatataaagggcatccaagttggaatggaagatgtcaaattaccttgtttgcaagtgatatgatcttatatttgaaaaaaacctaaagactccacccaaaaactactagaagtgataaattcagtcaagtcgcagaatacaaaatcaatatataaaaatcagtagcatttttatatgccaacagtgaacaatctgaaaaaaatttaagtaaccccatttaaaatagttacacataaaattaaatacctaggaactacccaaagaagtgaaagattataatgaaaactataaaacagtgatgaaagaaagagaacaccaaaaaaaggaaaaatattccatgttcatggaatggaagaagcaattttgttaaaatgtccatactatccaaagcaatctacagattcagtattatcataaggaaaaagaacaaaactggaagaatcacattatctgactttaattttttttatttatttatttttttgagacggagtcttgctctgttgcccaggctggagtgcagtggcccgatctcggctcactgcaagctccgcctcccgggttcgcaccatactcctgcctcagcctcccgagtagctgggactacaggcacccgccaccgcgcccggctaattttttgtatttttagtagagatggggtttcaccgtgttagtcaggatggtctcgatctcctgacctcgtgattatattacagagctatagtaaccaaacttcagggactggcataaaaacagacacataaaccaatgataaaaaatagagaaccaaaaaacaaatccccacacataagcgaactcattttccacaaaggtgccaagaacatacactgggaaaaagacagcttcttcaataactggtgctgggaaaactggttatctatatgcagaagaaggaaactagactcctatctctcactatacacacaaatcaaatccaaatgaagacttaaatctaaaaccttaaattatatataaaaaaaaaacccttaaactacaaaactactacaagaaaacattagggttttccctagaacattggtctgggcaaaaacttcttgtgttataccctacaagcacaggcaaccaaggcagaaatggacagatgggatcacatcaagttaaaaagcttctgcatagcaaaggacacaatcaacaaagtgaagagacaacccatggaatgggagaaaatatttgcaaactacccatctgacaagaaattaataaccagaatatacacggggctgcaaacaactctataggaaaaaatctaataataaaaaaatgggcaaaagatttgaatagccatttctcaaaagaagacatacaaatggcaaacaggcatatgaaaaggtgctcaacgtcattgttcaccagagcaatgcaaatcaaaactacaatgagatatcatctcaccccagttaaaatgtcttatatccaaaacacaggcgataacaaatgctggcgaagatgttaagaaaagggaaccaggccaggcacagtgcctcatgcctgtaatcccagcactttgggaggccaaggcgggtggatccctggaggttggaagttcgagaccagcctgaccaacatggagaaaccccgtctctactaaaaatacaaaattagctgggcatggtggcacatgcctgtaatcccagctactcgggaggctgaggcaggagaatcgcttgaacctggaaggcggaggttgtggtgagcagagatcgcgccattgcactacagcctgggcaacaggaaggaaattccatctcaaaaaaaaaagaaaaaagaaaaagaaaagggaaccatcctacactgttggtgagaatgtaaattagtaaaataattatggagaacagtttggaagttcctcaaaaaactaaaaatggagctaccatatcatccagcaataccactcctgggtatatatccaaaataaggaaaataagtatactgaaaagatacctgcactcctacgtttatttgcagcactgtttacaatagctgggatctggcagcaatctaagtgtccatcaacagacgaacggataaagaaaatgtaggacttctacacaatggaatactattcagccataaaaaagaatgaatcatttgcaacaacatggatgaaactggagatcattatgttaagtgaaataagccaggcacagaaacacaaacattgcatgttttcacttatttgtaggatctaataatcaaaacaattgagcttatggagagagaggatagaaggatggttactacaggctaaaagggtagttgggggatgaggggaaggtagggatggttaattagaaagaatgaatagaacctattagttgacagtataacagagtgactatagtcaataataacataattgtacattttaaaagaacgaaaagagtctaattggattgtttataacacaaaggataagcatttgaaggaaggatacaccattctccatgatgtgattatttcacattgcatgcctgtatcaaaacatctcatgtaacccataaatatataaacctactatgtacccacaaaaattaaaaataaaaaaataaaaaaatagaaatgatcaaacacctagaatacagtcaagaggtcaagcaggatgagatcagagaagtgtcaactggatttgagaacatggaagtccttgataatcttgagcacaattttcatggtgaagtcagagtagaagtgttactgggatgccaagaagtacagactgtctgtctgtgactatatataactctttcaaaaagttctgtgtgaaaagaaaggagcactaaaaatgaagccagccatcttttaattcttatggattgggctgtcagtctcttcaccctctagagtctattttttttttttttaatgaatctaagcatgcctttactcaattcaaaaaaaacctctgccagctctttgcggccctcaaaatgaagtcctaaacgtgataatataacatggattcataatttaactccaattacctcccttgcctgagagcccttgtgggtaaactgtcaatttcacaagctctttctaacctccatgtaacatgttggtcagcctgctggaagtgtcttccttctccacctggtaagcctgtatttacaacccatgactcagctcagacatcctcctcaccagtaccatgccaggcacttacacatcattcacatctacacctccccagtctttattcctttaagccagaaacatgagtatcagccttgacttccacatccactcatgtctcatcccccataactgttcgacaaccaaggcccagctattctactttctcaataagcctccatccccactctagacccctccatatccccactctagacccctccatatcgccactctagacccctccatatcccccactctagacccctccatatccccactctagacccctccatatccccactctatacccctacatatccccactctagatccctccatatcccccactctagtgctctccgtatcctgaatctagacccctccatatccccactctagacccctccatatccccactctatacccctacatatccccactctagatccctccatatcccccactctagtgctctccgtatcctgactctagacccctccatatccgccactctagatctctccatatccccactctagacccctccatatccccacctccctattccatctccctccacttgttttccacacagcagccagaacgaaccttttaaaacacaaagcaagtcatattgaccccagaataaaaatccctccatggcttttcatgctcttacaaaatgattcactgggagacaaagccctgcaccgtctgagccctgccaacctctctaccctggctgagagtccacaggactctcccagcactgtgttctggccacattgaccttgcagctcctcaaagccactgagttcctgaaccggttcccccatctctgccacccctttcacctgccattcctttcaccttttacacccaaatttgaatgtcatttcctcaggaaataagcacagaacagcaacctgacccagtcttaggacactctgcaattcttcacggtgctcacggccgcttccaattgcatctgcatccttatgtgactattctataaagcttcacctcccacctttagactggcagctccccgacaagggtgttggttttgtgcaccagtcataccccaccctcagctgagaacccagcactccacacttattgaatcaatgggcaaatgaaaaccctcataatttgaccttctctaggcaccgaccagaatctgagtcctcaacatggagagtaaatgtaaccaggctcctcttccttaacaggaactcttaccagttccaggtacttgtctttctaccaacttctatacccatagagattggcatcctctctaatttcctaaactcatcagttatcccttcaccttcaaatgcttcaactgacagactattttaaagcaagagaaacataacagagtcattttggtcctggacagaaaccagttctttagatttatattgcttggcttaatactgaatacccagggttaaatgttcttgcatgcaattagagattgtccataagatgtcggaagcggcatctgaggcactctgcttctttatcgagtatttaaactaagcttggcaaaaccaggttaactgacaaatggtatagaaacaggaaagtactttcaaaactacaaaacaccaagcaacattattaacattatgatcgttgcattagccagtcttccacttactagaggaatataagtccatttttacatggctaaaagtagacttctttagtgaatgtacttacatatagaaaatccaaaagaactatctgtatcagacactatctgatagaagatttatctgaaaaaaattttaaatcatacctattaatatgaatccaggtgtgggctttctttctcatgtaagggacaaagggtctgtttgtacaggtggaaataactgccaaataggctgaatggcaggaacacaaaccctagggatccaggaagcagcctcagaaaacaccttctctgaccagatacctccttgaagaaaatgtgtattagtttaatcagtgcatacatcatcatcatggtacacaaacttctttgctttccttcctttcctctttctgtccttttagactcaaatataccaaccataagccttagcatccataacttttaagtcagtttctaaatatacacaaaccaaattaagaatcccctaccttttgttaacatttggggataccaggtaaaagacaaacaggaatgctttgtactgtactatttttgttaacttttctgtgagtttgaaattatcccaaatgatttaaaacttttttttaatttaaaaagattatcctatcattgaatattttaaaatattgccatgaccaagtttacagtttgaattttaaagctgggtctaacacagaccagaattacttcaattcatccaaaatttctggccacaaagttatttttatcaacttaccttcctagctgacatgctcagttacaagttacaagtgctgtctccagaatcatcaaacaccacccagctccttcaggggcaactgatgttccttcagctcgaggagctctttcacacactccaaggtgaaagtactcgctcaagattcacagaggtatggctcagcaagctgcaccactgccttcaaggctgaaatgtccacatctgtggcctaaaatgtaaaataatgtgacttaacacgtggaaatcaaaattaagctccacgtataaaacactactgacagcctgatttttttaaagcatgcaataggggcagggatgcttcttccattatggaagcctatccttccataaaggataaacatgagaggcctggcttttagctcatggaacttacattgtaatcaagggggtaaataaacaagatagtgatgagtaggtgacagagagtaactagcaggggtggtgatctggttttgctgggatggccaggcgaagtcacctctgcgctgagaatgaaaaggaagcagccatccaaagagcagggaagacgcaaaaggcctgtggtcgagaggggcttggccactgaaagagcagaaaggcagtccttcttgctagagccaaagggaggaaactgggagcaggggagaaacagtaagtgatgaggtaggagagaaaggcaaaaagaccaggacatatagagcatctggcgcttggattttacatgttctccagcaccatgagaagccataaagccaacacgggaccctcggtaaatgcaatgcattagtagttttaagcagagaaattgtacacttctcttttaaaacaatgactttgactgcttttagagaagtgatgggggcaggaggggtgggcactatcataacccaatgaaaaggccagaacttcaactgaagatatcagcataatccaaaacttaaaaactcacaaggaacagctgcaacccactgcctcgttcataatcactgcagtatgcaatgccattttctaaaggagctgcagcaacaacttgtatacacaccccctggtttaacattttagcttaacaggactttttgtggttcagttaacaaacactgagaaaaattcacagctgtaattggagtgcaaatttaatgtaaaaggcccagtcagttgaaaaataagattgtttttactttctgcaatgagacacattatcaaaagattaaccacatatctacaaatttactaggcaaaaatgggatagttttaaaatgcctctttggtttgagttacttaatgggctacaactaagaaggtaaaaaattaatggaaactgttgacttcataattaggcctcctcattttttaaatgatctcaaatacttcctccacttcataggtttataatccagttccccttgtcaaaggacgctgaaacttaagccactttaattccctggtagctcctcctcagctgcctttaaaatttgcggaacacttcctacaccatagcaattagatgtgaaaaacatgctatttcaatcagctcataaactttaattaaaaataagcactttggctctaagagtctgaagtaaagtgcttatagcttgagacaaatgtcttaacaacaaaattaactttacctcaagcagcaccttgagcacatcatgtgccagactgtccgccatccagatggctcaaggaccttctccaagaactcagctgtgaattcccgtgcctcagaggccttgcagtcaactacaaacaaattaaacacaggaagaagtgagaatgcataaagcagagggaagttaataaatccacttaaatccattttctcagaaccaacaactggcaatctgagggactgagataggcagtctgcttataaactaaaaagataaaaggagcaaaaaaggacaggcacggtggctcacgtgtgtaatcccagcactttgggaggccgaggtgggcagatcactagagctcaggagttcaagaccagcctgggcaacacggcaaaaccctctctttagaaaaaatacaaaaattagccaggtgtagtggtgcatgcctgtagtcccagctgctcaagaggctgaggtgggaggatggcttgagccaagaagcagaggtcgcagtgagccaagatcgtgccactgccctccagcctcggtgacaaagcaagactctatcaccaaaaaaaaaaaaaaaaaaaaaaaaaagcagaaaagaaacaaaaaagagaacctactcacctaaaatgtagtcttgataggccctggattactcacagagtaaaagttgatttgtttgcaaaatttctaggtgaagtggcttttttccttctggaataaaactttgtaaactacaacctggctcatcaagacagttacaatcactgcgtgaatcttcattttgaaagaaacctaaaaaaacaaaaacgataagcaggcacaagtatcccagatacttccagtgctcgtagagtgcttctgtcttcacatccttgcttgaaattccaaaccaacaaggatttgagtatgaatgctctatttatctctattattgtcagaagaaacagctttacgaacttaaaaaatatctgaaaatccaagttctacttaaaaacagtaagagcttaagatctttcacaagttaggtttttgttgttatgtggggatttggaggaaagcagagaaataaggttgttttttaatccagtggaaaccacctaagttcttctccctagaagtaactatctttactatagttagtaagttataacagtcaagtatctgttatttttttttctcccaaacacttccacaaagcagcattaaaagagagagctgatttcctatactccctctccaacgggctgaagcctctctttattttctacaatatcagtctgccaatggctcctcaataaacagggatgagagattcttaataatgcataaggtttacttcactaagactactaggttcctcctcattaatttcaatgactgtgtctaaggaaaagatcagaaaatgcaaatcacattaggtttgggctgtatgtaattatgtttcataaggcatgattcagccagtggcgtatctaattctgtgtaataagatgtttttaaaaaacgaaatgacggctgggaacggtggctcacgcctgtaatcccagcactttgggaggccgaggcgggcggatcatgaggtcaggagatcgagaccatcctggctaacacggtgaaaccccgcctctactaaaaatacaaaaaattagctgggcgtggtggcgggcgcctgtagtcccagctacttgagaggctgaggcaggagaatggcgtgaacctgggagacggagcttgcaatgagccaagatcatgccactgcactccagcctgggcgacagagcgagactctgtctcaaaaaaaaaaaaacaaaaaccgaaatgaccactaaataagcaatgctgagggtagcacttagactggcagagtagtttccgaaggtggtttcaaggaaggtgtctgagacggtaattagcagcagtctttcttcctccaccacctttgattttctcctttccctttctccttccttccattcctttgtcccagctcaggcccccagaattacttgatcccacacatgagacgatcaaagcaggcaagggtctactactgttcacaaacactgacacgcatgagccttagagggcatcaacaccttactggctgtgtgacaatctctctgtgcctcagttttcttgcctataaagagaagataaaaatagtatgcttacttcaattaaattaagagaattaaagaaattacttgttaaccatttactacagtgccaattacacagtatatatgtatatttgttaaatataccttacttcggcaccactctttacagctattttgtttttccagctttactgaagtaaataaaaatattgtataatctaaggggtacaatgtgatgttttgatatacattatgaaatgattgccaccataaagcaaattaacatttccatcacctcgcatttgtgcgctgagaacacgtctcactctcggcaaatttcaagtacacagtagtgtcattaactacagttaccaagctgcacactagatccccagaacttactcaactttgtactctttgacccacatcttccccatttctcccacttgcagcccctagcaaccactacgctgctctttttctctcagttctgctttattttccacataggtgatattatttagaatttttctttatttacagccactttaaaaatattccccttcgcacagtgtttcactgcgtcttcaccacaaggacagccactggctccgtctttagatgggaaaactgcggcccggcgacttttgctagttggaaaggtgggtcagtggtggaattaagtcacacttaggccttttcacttcgcagcggctctttccactacacgatacaactgaacgtgttaaagtaaaaacgtgacccagtttaaaatgtcgggggcgggggaacggaagcggggggaaggaatctacctgaggagtgaggaggcagaaaggaccgagaacaaggggacccggttccatttctggaccccgtccgcaggctgctcgcccgacttggggtcgctctgccccggacgatcaggacagctgcgtgggcccagggttccagctgcctttatcttcgggagagcgaatggctcagatctccgcggagatggagctggaaaagcggagccctcgctccacggctcgcggcagttccttgaagcccacccaggtggggagcccctggcgcagcccaactctctgcagtctcggggaagctgaggcagagagggaagccccgccccgggtccttcccgaccccgacgtcctggcccgccgagtcccaaggccccggcccgggcgccccccgaggggccggacgcccaggcctcactagggagcggctcctggcccggcccggcgggcgctcacctttctcccgggcactggagcctccctggccgcccaggtgcacgcgaccccgagactccgtctcccggccacccagtcaggcacttcaaattcccgcggacggcgcggcgcctctgattggacgggcggccgagctcgtaccggtgagagccccgccccgccgccccgccaagcgccccctcccggcaggcggaccgctgctctcgctcaagttctggcgtggggctgcgctggagcaactggggcgaagttgaactgggacatccttggagatgatttttgaaaaacgagcaagccatgcctggaaatgagggagagtgggaaagacactggattgagagtcagaagacatggtgtttagacggacttcggccattcctaggggcactgccttgggcaaatcatttcccctttcaggcgcacctcacctgtgccaggatgctggcacacacacagtgtattttcaaagaatgtcaaatgtagtatttgtttttattattgatcaaaggcagctgtagcttccaataataatggctaacatctaccgagtactgtgtgcgagacacccttctgcatgctttacctgaattaccttatttaatcttcaaaaaccatcccgtgagagaggaactattattatacccattttacagagaactaatagagacaacgagaagtgaagtgacttctccgatctaactaggcaaagccaggaggtgaaatcagccagactccagaagaaaccctttagtgcctctgtcaggccctcacttgccaggctgatgagagcaacctgagatggcccaggtcaccaggacaccaggcggggtgagtccacaggaggccaggagcctggacatgacacccagggcagccttctcgtagggaaatatttccacttaatgctttgacggaaaacctgggctacagtctctcagatcccctacagctgaaataaaacggagccaggagaggtgattgtggaaacctgcacttaattcagctagctttgccaggaaacaagatttctttgacttgtgtgcagagtctgaccttacatttatttgttcactgaacaaatatttattgagcaccataaggtgaaaacacaaaacaataaaattaggactaacaacgggccttgaggactaaggtagctttttcataattttcccgtttaaccctcccgcccataaacctcacaagtggcagcatttctccttacccattttcatcatcactttagacaacacagctctcttcttattcaattaccaaatatttcttcaaacatcaagatattactcaaaccagtgcttctagaaaattatttgaaagaaacaggaggcaacagggtcagacagaataccaatgctattgcaaactccataaaggagaaactattgattacatgggatacatttgctagacacagcccttctcatttccacaccggtgtcaccacatattccctacttgttcagattctatcagaggtttttagagtctctccctaagtggagacctgttagaagcacatatgtcttgtgagttttctttccctgcccctccatatcctaaagaaaggatttttcttcttcctccttttcaatctcttcccttgtagcctatcataaccttctactcgccctaaggtggacatcacctactgctattccatcttttttatatctttgctctttttatcactactgggtccttactgtgtttaaacatgggctcacaaatacctgcgctccccctaaaaccttcccaaagcccaacttcaaccctgagaaactgcccttttgcttcccttcttggtagccccagacttttcagtacagtgcctccctctcctgctttcttgaaggccagcagcccctcctgaggcccccaacttccaccccacagcactgacctggctgaccacccacctgtgctctttcctcccttgccctctgcgtcctctcccttgatctccagtctagttctctgactacagtacctgggtgaactgtggtctgaaaggattgaatgaaaaattccagaaataaatgataagtttcaaattgtgagctgttctgagtagcaagactcattcctttgtccacaagtgcccacactgtatacgctacccatctggtagtcactgtcaaggccgaaggaaaacttctcctttacccttgaaggtttgttgaaaatcaaccaacaaaaggcagattaataagagaaaaggcatacaaatgtattcacatgcacggggttggggatatcacacaggatgaccgcaccaggcagtggggtagaggtggttgtacacccttcttcttagggcaaagggaggtgaggaagtgtggatgattgaggggtatgaggggagaattccatgggcttaaagaacatacaatgacctgggacaaagtctgttgagcccacagagcagacaatggtttatgacaaaagtccgtccaggggtattgaaaaactcccgtctttcttcctgcaatatacattcagttaattaaaattcagggaagaaacccaaggtaattgtttccttctttggtgggtcagactttaggcagaaaaaggaacttcagagaacttcatctgtgctttgtgagagacagaggattggaagacaggatagtgaaggtcagagagaccttgaggctgcttcttcagctcaccatgacaaagcactgtggtttggggtatcagtttctgggccccaatatcactcagtggccatctcaattatcagatcaaaaaagcatagtatagtatatacagggtttggtgggtttggtactatttgtaatttcaggcattcactgggggtcttggaacagcacagtgggagtacagtagtgttcccaaggataagggggcactactgtactctttcttgcccttgtttttcttcctgtctctcagattctctaaacctaggtgattcccaggggcatatactacagaagtcctagtacaggttatggtgattcatgcaagaaagtagatttgctcatttatttgtcaaataataaatatatatatagaatagactgtgggccagacattgttctacattctagggtaacagggcaaataagacagccaacatcccagcctgcacatgatgaaaaagtaaaaaaaaaaaaaatcaattcacaagcaaatttcaattataaaaaatgcaaaaaataaaagaaattcaatgatgtgacagaaaatgaagggggaacaaattcagattttatgcaaaacacttgattttaaactgttagcaactaatttttaaaaaaattaaataccatgtaagccagaaaaacttcacttcctgggccaaattggcccatggcccaccagattgcaatttctgttccaagctccaactactgaaaatgtagtccagggaccaggagattgttagaaatacagagcccctccctccctccccaacccatcccccagagctgctggatcagaatctgtgttcaacaagttccacagtccccaagtgacatcattcacatttgatgcaaaggccttcagaactcatgtctttcctgaggctgtttaattttcatattcctgctggaaaacttgacctggggttcttacctgtggttcacctccacctccacaatgctgcaaagccacacctaagcacagcccatcctccagtttagatgtctctcaccatgtcccactccccaaccacggcctgtgtgggccgccaccatctcccctagggctgctggggcagcatctaggaagtcacactcaagcctccacctgccccagcccttcagaattgactgctctcctcttgctgctcctggtctaggggtctcaaacttaaatatcgaaagtctagaccaaagacacaaagcagagaagtgagtgctgctctttctccagtgggcaggagatgagccaatgttgccacgtgggccttccaagagaagccataaagctaaatgtagtgagacaatttccatattaaaatgttaacatctagtttttaaaaattcaaacagtatgcccaccaaataaaacctatctgcagaccaccagtttgagacatctaagacctagtctgcatggtgcattgtcacagaggctgtgcactctttgaaggcaagaaacgtgtcatgttccttattgcgttgctggcacctaccactaggacggatttagtaaagggaaaaactaaattaatactgtttgtatctgtgtgtgtgtctgtcctttttcttttaaattttagattcaagggcacagatgtgggattcttgcaaggacatattgcatgatgctaaggtttgggtttctattgatcctgacacccaaatagtgaacacagtacctgtatttttcagttttcgcactgctataaataaccacttgagactatgtaatttataaggaaaagaggtttaattgactcacagttctgcatgactggggaggcctcaggaaacttacaatcatggaggaaggcgaaggggaagcaagtcacatcttacatggtggcaggagagggagagagaaagaaggagaaggagaaagaaggaggaggaggaggaggaggtggagaaggaggaggaggaggaggcagcagcagcacatacttttaaacaaccagatcttgtgaggacacactatcatgagaacaggaaaagggaaatctgcccctatgatccaaccacctcccaccagttccctctcttgacacatggagattacaattccacatgagatttggatggggacacagagccaaaccatatcagtacccaataggtagtttttcaacccttgccctcctccttttcttccactttctggagtaaccagtgtctattgttctcatctttatgtccatgtaaacccaatgttttgctcccacttataagtgagaacatgcaatatatgcatttctatttctgcattagtttgcttaggataatggcctccagctgcatttatactgctgcaaaggggatgatttcattcttttttattgctgtgtaatattccatggtatatatgcagtacattttctttatccagtccactactgataggcacctaggttgattccatgtctttcctattgtgaacagtgctgcaatgaacatacgagtgcagttgtcttttaggtagaatgatttcttttcctttaggtatatacccaataataggactgctgggttgaatgattgttttatatttagtcctttgagaaatctctaaactgtttcccaaagtggccaaacattcctaccaacagtggataaatgttctctctctttttttttttttgcaaccatgtaggctgctttgggaagtatggctattttaatgatatccacttttccaatccatgagtatggaatgttttccatttgtttgtgtcatttatgctttctttcagcaatgttttgtaattctccttgcagagctctttcaccttcttggttagatatattactaggtatttttttgtgtgtggctattgtaaataagatttcagtctttacttggtaatcggcttgaacattattagtgtagagatatgttactgatgtttgtatgttgattttgtgtcctgaaactttactgaagtcatttattgggtctagagtctttgggcttttggtggagtctttgggcttttttaggtgcaggattatataatcagtaaagagagaaaacatgactacttcttttcctattttaatgccttttacttcttgctctttccttattgctctggctaggacatccagtactgtgttgaataaaagtggtgaaactgaatatccttgttgtgttccagttcctaggggaaatggcccagcttttggccattcaatatgatgttggctgttgctttatcatagatggctcttattattttgatgcacgttccttttatgactagttatttgagggtttttatcatgaacaaatgctggattttatcgaatgctttttctgcatctattagataattctatagtttttgtttttaattctgtttataagttgaatcacatttattaatttgcatacattaaactaactttgcattccagaagtaaagcccatctgatcatgtgtgaactaagtttctgatgtgctgctaaatttagtttgctagtattctgttggggacttttgaatgtatgttcatcagggatattggcctgtaattttatttttcggttgtgtctttgccagattttgatatcaggatgatactggtttcatggaatgttttaggaaagaatccctcctcttcaattttgtttgaatagtttcagtgggattggtactagctgttttttatgtgtctggtagaattcagctgtagtccagggctttttttggtgagtagttgtttttgtttgtttgttgttcttgtttgtttggtagtgagtttatttccatgtttagaacttcattaagcatctcttgtaggcctggtctggtggtgatagattccctcagctattgtttttctgggaaagactttacttctgctttatgaagcttagtttgtcagcatataaaattcttggctggcatttcttttctttaaggatgctaaatatgggcctcaatctattctggcttgcaaggtttttgctgagaagtctgctgttcatctgctgggtttcccctcatagttaacatgacccttttctttagctgactttaagatttttttctttcacactgaccttggatagtctgactacgcgccttggggataggtgtcttttatagttatcttgcaggagttctctggatttcttatatctgcaggttgacctctacagaaaagttggggaaacttccctgaattatattctcaaatatattctccaagctgcttactttctcttcttctctctcaagagtgccaatatgtcttagatttttattgctttacataatctcatgtttctcaaaagctttgttcattaaacattttttgtctttatttttgttggggttgattcaaagaaccaatctttgaactctgagattctttcatctgcttggtctatcctgttgctaaggttttcagtgtattttgaagttcctgtagtgaatttttaaaattttcaattccaaaagttctgtttatttcataacataattatgttgtctttcaaatcctgaatcacttttctgtttcctttgtgttggatttcaactttctcttagatcttgttgagtttctttgccactcacactctgaattatatttctgtcatttcagacatttctttttggttagaatccacttcttgggagctagtaagatactttggaggtgacaaaacactctggctttttgtattactggagttattgtgctgatttcttctcatctgagaaagttgacactttatttttcaaatgtgctaccatttggatggggcattttgatttcttattgttttttcctttgagaatttgactgtggtttatgttgtgtatgatcaattggctttatgtctgagagctatcagagggcctgggttccttggttgcagacagattcatatggtggctttctaggaaactgcttggtgtagcaatgtgttttcatttggtgctataattcagactgcagtcaagtcgatggcacttcagggcaagagccagcaggagggtctcactttgcctgtgctcaccctcagcaggggtggaggcaatagagacatacgagagcaccctcccccagcactgctgttcttcagcagaagtagaggcccttgagaagctcgagaagtgcctctttcagcccacgcttcccgggacccaacaggaagatctatggctgcatccacagcaaggcactgaggagaaacaggggcaattagacgacctcctctccaagtttgtttgtaggctttggtgttaccccctccagtggttggcactgcgcttccatttcctttgacccaagggaagctttgacaggctgtgttcttacttcccttaaaggctgtcctcaccaagggttaggtctccagcgcaggtgtgcggggcaggtaagggggagggtgcctcccttccactcctcaaagttggtgggtcacactttgccagctgatcaagggagcaaactggggcacccagcaaggatacacactgactggttccagatcataaagctgtccttggctgcaagtcctcctgctaaggagaaacctcttcttcagcacttctcctgcggcagccccctgtaacaagagagtctaatttaactgcctgctcctggagtggtatccacactcaccactcaattctggctgtgggggcccttcccctgctccagggcaaatggtctactctctggcctgagactaaaatgtctgcagaagacattattgccaggttgccacacaatgactgccttggtatgagcccagattaaaaatagtatcatcctctcggtcccaagtctgggaaaatgccagcagcttttcccagtgtcttccctccctccatctctcagcctcccccaagctagctccggggcttgagaaaaaaggggtgctctgtcttggcctgggttgcacagacccctagcagaaggatgagacacagagggagacaggctgccacccttgcagacaagggctttactcactggtcagccaaatgctgtcatggaagctgcttgtgcgtctttccctccccagagtctggtgtgtccttcactagtctggtgaattcctgtcttccttcttgagtgaaaattcacagagttgatctttaagcactatttttctatttccctgtggctgtggcatgcggaaagcctctcatctgccatcttcatcattaccggattctctaatttactgcttgttttcccttccttccttccttcctttgcattctcttttcatcaccaacatggtctctaacccctagtggacctttcagatagtggtttgcctatggttctttttatatataacaatacaatgtcattagccgaataacttgggtttagagtctagcagccagggctggggccatgctggctgcttctgcccagatgcttccaggaagcagattcaacattgacatcattacccgagtcagggtcagtgaaggctgattgtattggtgaccctcttccgcctgcaaatatctcaacagcttccctaagaacaggaacagcctttcgggtggtaactaacagcgtggctaagggctttgattccctaggagacaagtactactgtaagtcattattggacattcatgtgaatcaatttcagagagcaaatatggaccagacagacagcacatattctgaacagcagagaaagggaaagagggcccctgattgtaggaggggtcccattggggtaaggcttgtctctctatctgcagctgtatagagctccacatgggcccagggtgggcctgagcaccttccataagaaagaaaggtagcccacaactcccatcggcttcagggagagaagagatactagctcactgctactgatttgagtatctagggcttcccataatgaaaacgaaaccaaagaaaagccaggcccaaatcttggcatgtattttccactagagggcagcttaaactttcaaaataaaataaatcttgcacactttgtaaagtactatatataaaatttgtatgtacacatcatgtaaaactaatgttcatattctagtctttgcaagcctgtacaagcaggtcaagtgttcaattccatatgtctgaatgtatgtatcctaggaaactagtctaggatacaactgaaaaattctgaagaaagttaagaagagaagtgccaatgcccagtgatctgccctctcagtccaagtcctgccctgcacgacccagtgtttatgtttttatcaggcctatggagagaacacaggtcagtgtgtctgcttctagctatgatgaggaactgaagttaaatttaccttcccactataaggaactagaaaaccagacaaaatatatgaaacaacagtttttaaacaatgatcacggcagggctgtgatccctaagagaagacaaacaaaagttgtgagtactgtaatccccctggctttctgcctgcaggcgcctctggactgcagaactggaagggggagtttcaacagagcacagcatctcaccgagttagggaaagagagatcagtttggagagacagtagtggctggaatttttaaaaagaagaaccaagagaaagagctgatttcaaaaagagcttgagaaatgtttagaaggttgccactctagtctgattctgaatactgagccacatgttactagggtgaaactgcatgggctgagccaagagttaaacgatgaccacaactcacacagggatgggagacatggagttcagacaagccagagcggtgacccctcaaagacaactatctaaagtatataaagcactcacagaactctgaaaacaacaaacaatgaaagacaaataggcaaaaaacataaatagacatttcactgaagaggatataaggatgccaaataagtacatgaaaaatgttcaacttcattaacataagggaaatgacaaatgaaacctgatggctcacgcctgtaatcccagcactttgggaggctgaggctgctgaatcacctgaggtcaggagtacaagaccagcctggccaacaagggggaaaccccatctctaataaaaatacgaaaaaattagccgcgcattgtggtgcacgcctgtaatcccagctactcaggaggctcaggcaggagaatcacttgaacccgggaggcggaggttgcagtgagcggagatcgcaccactgcactccagccttgatgacacagcgagattctatctcaaacaaataaataactaaaaccataatgaggtattactacacacatatcagaatgattagaataaaaattagcagaagtagcataatgctgcgatacagagaaactggattactcaaacattgctggtgaaatgtaaaatggtacaaacactctggaaaatagtttggtgctttctaaaaaaaatgaaacatgtaagtaccataagacacataactgtattcctgggcatttatccctgagaaatgaaaattgtgtttatacaatcacctgtacactaatgtttatagcaacattagtcataatagccctaaactggaaacaacccagacgtccttcaataggtgaactgtcagacaaattgtgatgccttcaagccatgtgtataaattagacttctccagagaaagagaattaatataagattatgttggtgggactgtaaactagttcaaccattgtggaagtcagtgtggcgattcctcagggatctagaactagaaacaccatttgacccagccatccctttactgggtatatacccaaaggactataaatcatgctgctataaagacacatgcacacgtatgtttattgcggcactattcacaatagcaaagacttggaaccaacccaaatgtccaacaatgatagactggattaagaaaatgtggcacatatacaccatggaatactatgcagccataaaacatgatgagttcatgtccttcgtagggacatagatgaaattggaaatcatcactctcagtaaactatcgcaagaacaaaaactgaacaccacatattctcactcataggtgggaattgaacaatgagaacacatggacacaggaaggggaacatcacactctggggactgttgtggggtggggggaggtgggagggatagctttaggagatatacctaatgctaaatgacgagttaatgggtgcagcacaacagcatggcacatgtatacatatgtaactaacctgcacattgtgcacatgtaccctaaaacttaaagtataataataataaaattttaaaaaaagattatatatagagggggtggggggagagagagagagagaagggggaaatttttagaaattggctcacacaattgtaggagctggcatttttaaactttgtagaccaaacaggcagactgaaaactcaggtaggagtggatgctgaagtcttgaggcaaaatttctttttctttggaaaactagtcttttctattaaggccttcaactatttatatgaggcccatgacattattgagagtaatatcttttacttaaaatcaactcattatagatgttaaccatgtctacaaaataccttcacagcaacacctatattagtgtttaattaaataactgggtactatggcttaatcatattgacacttaaaactgaccatcacaccatattcagcaattaagaagagcaaactattgctatacataagaaactgggcgactctccagtgaattttgctgagcaaaaaagccatttctaaaaggttacatactgtataattccatttatataacatttttgaaatgacaaaattttagaaatagaagagtaattagtggtagccagagtgggaggaagaggtgggagtagataagaagaaaaagaaggagggtgtgtttatgaaattacaacataagggatcctcgtgatactggaactgaccagtatctgaactgtggtgttgaagacatgaacttatacagattctaaaataatataatacttaatccacacacacaatgagcacagcaaaattagggaaattggattaaggtcagtagattatatcaatgtcaatatcctggtataatagatactatattatactatattatagtgtataatgagcataattttcatttctcagggataaatgcccaggagaacagttgtgggtcacatggtagttacaggttttatttgttaagaaagtgacaaactacttttcagtgtagttgtaccattttacacttccagcagcaatgttggagtgatccagtttctctgtatccttggcagcataacactatgccacaacatagtatctgctatactgtattatagtatattatatatatactatagtatagtatatattaatgtatactatattatactatagttttcaaatgttacaactggaggaaacaatgcaaagtgagcggaaatctctattattttttaacatcaactttattcttataatttacataaataaaatgcagtcactttaagtgtacactttaaaagtttcaacaaacatatacaattgtacaatcatcaccacaacaaagatataaaatattttcatcatcccaaaagagtcccttgtgtcacttcccagtcaaccgccttctcctaaaacccctgtttccagcccctggtaaacattgatctgctatcattataaatttgtctttactaggtttcatatatgtagaatcatggagtgtgcatactgtataattccaactacatgtcattctggaaaaggcaaaactatggagacagtaaaaagatcagtggttgctgagagttacgggcagagagtgggatgaataggcagagtagagaggatttttagagtagtgaaattttttgtatgatgctataatactggatacatataattacagtatacctttgtcaaaacctatagaatgtacaacatcaagaccgaaccctaatataaattataaactttaggtgataatgatgtggcaatgtagactcagttgtaacaaacgtaccactccggcagacaatgttgataatgagggaggctgcggaggatgtattaatacaagggaactatctgtactctccacttaaatttgctctaaaaaaaagtatttttaaaaagaaaaagtaagaaaagctcagagcctaccagactcataaatgttagtgttcttcagggatggcctcacttcttttatgtctctgttcttaaaaaaactagataattttatccagtcaacccagcaatgtccttgttgggtatatgcccagagcaacatacactgttctaccagaatgcatgcccacaccagcattcaccatagcagagacagggaatcaaccaaggtgcccattaatagtggactggataaagaaaatatggtaaatatataccatgcaatactacacaccatagaaaataatgaaattatatcctttgccactggaggccattatccttagtgaaacagtgtagaaagagaaaaccaaataccacatgttttcacatataagtgggatctgaacattgagtacacatggacataaagatgggaacaacagacgctggttgctacaagaggagagagggttagatggggggcaaagttttaaaaactacctatcaggtgctatgctcactaactaggtgatggtattattcataccccaaacctcagtgacatgcaatttacccacgtaacaaacctgcacacgtatcccctgaacctaaaataaaagttgaagaaaaaaagaagccaaaaagtgtgttattattgaataaaagaagaattttgaaatgacttatagcactctttccaagttttggtcccctgtgttagaccttaaggtatcaatacgctcttaatattataagaagttttgatttttaactcagagaagttcaacttttgttgtgtcttgctgctttcagctttctatcctcttgagaaggcctgagaggataactttctctttgtaactttttcatcagtgtttgtaacttttttccccctataactctaaatgctgttgaggcctgatgcaaaaatattttatcttaaaggtctcaaaggcagtggtttcctccagtataacttgattctgcactcttgttttttcttaatatatctaaattgtttcatgaacaggaaaacttaactcatgactgggagtaatttgagtattctttccatcaggtttgaattccaggtgatctgaataggcttctcataagtggaagccatcactgcagagggtcttccttcgactttggtaactggcctaagaaacagatcttatgttttattgagataattcctacgtcatcattattaaattttttatttgcttaggaaaactgagatttaaagaaaaattaaggcttttacacctatataacattctgtattgattttaaaatccttgtgctgttaagttacaggactttgactcctgggtcttgaaaaggcaccaattcctgttaaatcttgaacatttaaaatgcatttgtgagacacagggccagaaattaaacttattcaatctctctcagcccagggactactatgaaagaggtgggcatgtaagattataggggcttattttgagagacaaaattagttcagagtttctctgtaaattaaacatttttatcaaaagcacattgatgcaaggtcagcatataggtccctgtgttggaatagcaaggtttccttgaggcattaatctgctccttaacttaaaaaaaaaaaaaaaaaaaaaagcttataaaagatttatggaaattatatcttatcaagctgactaaaattagatttgttcataaggcttatttatattagcttaaatattagtaatacattatatgaaggtaaattttaatttttagttttctcttttgaacaaaacgtttgtgtaatattaagaaatagtaaaatgtttttgtttgccctttgagtaaactacaaaaaaaaaaaaaaaagaaaaaaaaaaacaagaagggggagagagagagacagacccagctggcctcatggtgtctttattagaccttattatttgggaacctgagtctcttctatgttaagagtaaaagtttctgcctttttgaaatttttgagttatcactttggctaactgaataacttattttcagtaacatataatgccattttgcaattttaagtgttttaaacctttgttatttgacaaatgctccaaaatcaaattctaaattcagtcttttggccttaaactaactttttagaagtccagcaaagacatatttgtcttatttggtataataaaatcatacaggaagcattgtcaaatatacgaaggtgtttaactttctttgggttatatttatataaatgtcttattagtatgtgcttcaaaatcgtatgattcctacagttctaatatgtttgagtatatgttatcagtaataattataattattatgttaaattgttgtatgttacaaaataatcaaatttccttgtcaattgtatctctaacaatgacagttctaagattttgccatccacaaatattgtattactttaatccttttcaaaaagtagtttttaacttcagtgagtgctcttaaacacaggtttctgataattttggagactgtgttgttggaatagaaaaatataacttccaggactctaattaaaaagttaatgtgttcatgagaattgtcaacacaatatcaactggaatgagttaattgggcttgatggtttgaaaaaatctaacctgagatttattgtattaaaatgttccagtaaagccaattttaaaaagaagcctatatggaggatagtttttcttgctggaatttatgcaaataatcaggccaagtataataaaactaaaacattttttttttcaaataaattagtcctgctatgagttgtctttggtaaaaatggagaactgaaagagacaaattatctttcaaaagaaactatagtatatgtgttattacattctagtcttgttcactgttttttcagtttttattattttctacaatttggaccaaatcctaaagttttcctggctacaagttttccaaactaatgtttttaattttttcctttcttttttttcctctaatttgtctaatttgaaatcaccagaaattaaagctgtgtttttctcaaagcactgtgaactgaagctaaacaacttaggaagaaataacaacctatttatatgtcctaaatcagttttccaggattcttttccctttttgttgttatgatctttcctccctcctttttttccccattttatttctctgttcttctcaatggaatgtgagaattcacaacctgaatgagccttcctaacaatgtggacttatccatctaggaatgaactatcctagtggtgagagatcagacaaaacccaataccacagattcattttcatctaaaatactttctttgaaagatccttttaaatagggggaaagtgataaagaaaaactagaatgttggaaccccaaattaattatgccaaaagggaaaagttagagcctagaagctgagttattaaaaacaaaacaaaacaaaaaactgcctttccttttgttcctaaaccgattgctacagatagaatgccacatgtctccacaaagggcctccctcatcctgacaatgtaaattaacagcttatcttcatggacacaaaacaagaggagactggaaaccgtcccaccacccaccccaagacaaatgcatacttgactgcttcctctactcaatgtttactttatcttatgtaaagtgcacatttaccgaacacgagatgaatgcataattgacttttccctctacgtccgccttttcacgtgcaacaggtggattcagttaacctaacagaagcctcacaagaatgtgaccatatccttctcttttctttctttccctttttcccttctgccacatttaccctttaaatattgaagccatcaaaaccttcctcagaaaaagcacaggccccagatcctgttgtagcttatgtctgtttttcccaggtacatcgtcagccttgacaaaatacatctctaaaatgataaagactcgcctcattttttctgatacatatgaaaagagggtctatatttacattaatctctgagtgttcttggcctcattgaagacccacttccaaaaattagacaccttctcagaaattgggaggaatataattttttgcttcaattctcaccaaactgcccagaaacctcctgacatcttggaatgtcttttaagaatcccaggtatcccagtaaccattttcacatacaatacagctggactggctggttcatgatgtaaatagacctgttctgtcacccctactccatcactgctgtcacacagacattcctcctcccattctaaggaaaggtctttataatgtgacaacaccttcctcaggaagtctcccagtccttatttctgagtgagcctcatatttcattatttttggaggatattcctgaccagctggggtgatggtaccctaggagaaggtatcattccatactagtcttgagctcagaagcagatccgggaggaattgtcccttaagcactaagggtttctactcttctcaacccatattcattccttagtttatcccacccagtctcgtggctttaaactccatctacatttttcacttttgaaagcatgctctgtggaccagtagcagcatctgggagctggctggaagtgcagctttccagaccctgccctcgtcctacaaaatcagaatttgcattttaacaaatccccagatgacttaccagcatgtggtggtgcgttgccctatgcctggtacctcccaagttatctcctgtcctgatatctgccccagccactctgcagctgcttacatcacagttcagcttgaaggtccaccagacatattaaacatatccaaaatcagattcttagtttctgctccctaaccctgccccaccccctgccttccccattccagcaattacccttatccagttgttcagaacagcaatcttgtcattatccctgaagacttccctcatacgctatccaatcccccagaaactgcttccatccacttattaccacttgccctgctgcctgtccaaggcaacatggcgtctgacataaagtgatacaatttcctccatcttgctacttccagtcttaccaccacagcagccatcatgatccttttaaaatgcaagtaagaacagttgctcccagagtcccatctcatgttttggagtgctggtcacaggcgtcactgtggcctccagggctctgcaggatctgaatatgccctgagcccagctcatggccagccattctcccatgactcacagctcaccagccaaaccagctgctttgtgctccttgaagtgtgaacacatggacacactcttggccacagtgctagtgtggctcatgcttcatctgctcatgtttcttctttatggaggttttcctcaccacctcatcaaaacgatgcttctgcctatcctctagtcccattttctgttatttttttcacagcagttcttgccacctgacatttttcacatttatttacctatttatttattttctgttttcccaactaaagtgaacgtggtgctttgtggttttgctgtctccagtgcctagctcaatgtctgaaacatagtagatttttcttaaatatttgcttagtaaatgaattttactgctcagtgggcaccactcttacccctgagaaagagtcctatcatttttctaaataggccaggagaagaggtcctgactgctatcattaatcactagttagtccactacttttgcctaatggagtaaacatatcctaataactttttcccaatgtttgcttacaaagtcccttctggatcaaattcttatgttagagaaagaaaacagtgtaagatgcatttgaaagaaagcataattccatttgccttttattgccgcatatcactataggcctatggagtgaccaatacaaaatgaaaaatattctcctaatatttgtaaactttcacttagaaaaacttctcattccctgaactcttttcataccccgagaaaaaaatacttaatggtaaatgttttaaaaagcaagcttacatttacttgttatgagtggatttctctataagtcttagtatatatcagagaaaaaaacatgttctaaaacttctcaatgtttgctaacaaattcctttctgtgttaaacccttccaatcactaaaaaatagtttataattcttttgatcaaagtataatttcttacaaatgtttttctatataaaaatttttcattcactttaataaaagttaatgatatatcctaagaaaaactctttcttacatttgctttttattgctggatgtctttattggtagatgaaggccagaagaagtaaaaagaagttcaaattacatatatatatacacacacacacacacacacacgtatgtatatatacatacatatcatatatatgatatgatataacatatatatgatatgtatatccatatcatatatatatgttatatcatatcatatatatatcatatatcatatcacatatatcctatatcatatatatcatatatcatatcatatatcatatatatataattgattagaaaatagttttcttgtacaactcgttcatgcactgaaagaaaacagttgatagtaaattttgataaaagcaagcctgacattgactatttataggtggattgctctatcgtcctctaggccaggggtccccaatccctgggccatggaccactactgctctgtggcctgttaggaactgggctgcaaagcaggaggtgagtggagggtcagtgagcaaagctgaactccaactcttattgtgaactgcccctgcgagggttctaggttgcacactccttatgggattctaatacctaatggtctgtcactgtctcccatcacccccagacgagaccatctagttgcaggaaaacaatctcaggcctcccactgattctacattatggtgggtatgtaatgataatagaaataaagtgcacaataaatgtaatgagtttgaattatttcgaaattatctctccaccatatgtggaaaaattttcttccaagaaactggtccctggtgccaaaaagtttggagcccactactctagatggctattagcaaaatgaatatgttctaatacatattcctcaatatttgcttacaaatgccattttgtgacaaattctattcactgacaggaaacagtacatgatgagtcctagggggaggatgattacaaatttattttatatctaaatatctctctaagtctataagcactgaatgagaaaaaaatatattcatataacatgttctaaactttcactttgaaaaacatcttattcatccaaattttctattaactgaaagaaaagttaacaaagaatcatgaagaatgcaagcttacatttactttgtatgcacagatttctctattggcctcctggcataaatggacaaggacacatgttctaataacctattttccaaatttgcctaaacatgccttcctgtgtcaaactcttctatgcactgaaaaaaaaaataacttatgatgcatcctcaaagaagtataattacattttccttttattgctgggcatctgtgttggctgatgagggctccaaaaacccagaaatatattagaatactgtattagtccattttcacgctgctgataaagactacctgagactgggaaaaaagaaaggtttaattggacttacagttccacatggctggggagtcctcaaaatcatggcaggaggtgaaaggcatttcttatatggtggtggcaagaaaaaatgagaaagaagcaaaagtggaaacccctgataaacccatcagatctcatgagacttattcactatcatgagaatagcatgggaaagaccggcccccatgattcaattacctccccctgggtccctcccacacatgtgggaattctgggagatacaattcaagttgagatttgggtggggacagagccacaccgtatcattccacccctggacccctccaaatctcatgtcctcaaatttcaaaaccaatcatgccttcctaacagtaccccaaagtcttaactcatgtcagtgttaactcaaaagtccacagtccaaagtctcatcggagaaaaggcaagtcccttatgcctatgagcctgtaaaatcaaaagcaagttagctaattcctagatacaacaggggtataagcattgggtaaatacagccattccaaatgagagaaattggcaaggggatgcaggcccatgcaagtccgaaatccagcaaggcagtcaaatcttaaagtttcaaaatgatctcctttgactccatgtttcacatccagttcacgctgatgcaaaaggtgggtttacatgggcttgcgcagctccgcccctgtggtctggcagggaactgcctccctcccagctgcttttatgggctggtgttgagtgtctgtggcttttccaggtgcacggtgcaagctgtcggtggatctaccattctggggtcttaggatggtggctctcttctcatagctccactaggcagcaccccagtggggactctgtgtggagtctcccaccccacatttcccttccatactgccctagcagaggttctccatgagggccccagccctgtagcaaacttctgactggacatctaggtatttccatacatcctctgaaacctaggtggaggttcccaaacctgaattcctgacttctgtgcacccacaggctcaacaccacatggaagctgcaaggcttgaggcttgcacccactgaagccatggcctgagctctatgttggcctctttcagtcatagctggagtggctgggacacagggcaccaagtacctagaatgcacacagcatagggaccctgggcctggtccaggaaaccatcttttcctcctaggcctctgagcctgttatgggagagactgctgtgaagacctctgacatgccctggagacattttctccattgccttgggtattaacattacttatgcaaatttctgcagctgacttgaatttctcctcagcaaatgggtttttcttttctattgcattgtcaggctgcaaattttccaaacttttatgctctgtttcccttttgaaactgaatgcctttaatagcacccaagtcacctcttgaatgctttgctgcttagaaatttcttctgccagataccctaaatcatctctctcaagttcaaaattcctcaaatctctagggcaggagaaaaatgctgccagtctctttgctaaaacgtaacaagggtcacctttactccagttcccaacaagttatgcatctccatctgagaccacctcagcctggaccttattgttcatatcactatcagcatgtttgtcaaagccattgaacaagtctctaggaagttccaaactttcccatattttcctgtcttcttctgtgacctccaaactgttccaatatctgcctgttacctagttcaaaagtcgcttccacattttcaggtatcttttcagcaatacccactctgggtatcaatttactttattagtctgtgttcacactgctgataaagacatacctgagactgggagaaagagaagtttaactggacttgcagttccacatggctggggaggcctcataatcatggcgggaggtgaaaggcatttctcatgtggcagcagcaagagaaaatgaggaagaagcaaacgcagaaacttccaatgaacctattagatctcctgagacttattcactatcacaagaatagcatgggaaagcccggcccccatgattcaatttcctcccctgggtccctcccacaacacatgggaattctgagagatataattcaagctgagatttgggtggaaacacagccaaaccatataaaataccatatacgaaatttttagttaaaaaaattatctcattcattcaactattttattcactgaaataaagcagttagtgacagatctggaaaaaagttaacctacatttactgtttaaatttatgaatatcttttctggctgttggtgtctattggagaaagaaacatgtcctaataatgtcttctcagtgtctaagtacaaattatttttgtgttaaactcctctattcgttattttaaaaagaagttcttgatgcatcttatggaaagcatgcttacatttgcctctgattgcgtgacatctctataagcccataagagcccgatagggaataaaaatgttcaaattatataacacaaacctttacttagaaaaggatcttcttcttcaagctctttcattcactgaaagaaaacagttaattatgaatcttaaagaaagcaagcttacttttactctttataggtggattttctattggtctcttgctgtctactagaaaaagaaacatgttataataatttcttctttgtgtttgcttaaagatgattttttttcaaactctccatttacagaatgaaagaatactgtgatgcatcttaaggaaatcataattaaatttgctgttttttttctggatagctctactggccaatgagggcccaaagaagaaagaaaaatgtttcaataacatgttctcagttttcacttagaaaattatcttgttcataaaaatcttagacttactgaaagaaacagtgaatgatgaatcataaaaaaaaagcttacatttactttttatacgtgtatttttctattggcctattggtgcctattggagacagaaatatgttctaataacttctcaatatttgcttacaaacacctttctttttgaaacacttcaaataaaaaaagagtttattatgcattctaagaaaaccataattacacttctcttttattgctaaaaatgtctttaggcctacgtggttacaatgggcatagcaaaatgttcaaataacgtgttctaaacttttggttagaaatgcatctcacttatcaaattcttctattcactgaaagaaaacagttaatgattaatcttgcagaaaacaagcttacatttactttttataggtggatttctctatcagcctcttggtgctcattggagaaaaaccatgttctaataatttcttctaaatgtttacttacaaatgccttttagtgtcgaactcttttattcactgaatgaaaacagtttacaatgtttcttatgggaagcatgactacatttgccttttgttgctggatatttctgtatgtctatgaaatctcagtggaaagagaaaaatgttcaataacatgttctaaacttcactgagaaaagcatcacagtcaccaaacattccagttcattgaaataaaacagtaaataatcaatcttgcagaaagtaagggtacctttactttctatgggtggagtttttttgttttttggacttggcacctattagagaaagaaacatgaccttctcaacatttggttataagttccttttttgttaaactatcattcatggaaagaaacaggttataacgctttttatggaaagtatgtttccacttgcctcttattactgcatatctctataggcctatgaggtgtcagtaggaagaataatgttaatatgttctacaatgagaacacatggacatagggtgggaacatcacacaccagggcatgtcggtgggtggggggctgggggagggatagcattaggagaaataactaatgtaaatgatgagttgatgggtgcagcaaaccaacatggcacatgtatacctatgtaacaaaacttcatgttgtgtacatgtacccaaagacttaaagtattttatatatatatatatatgttctaaacttaactgagtaaaaaaatctcatttgtcaagtgcttccatttgttgaaagaaaacagttaatggtaaatcttgaagaaagtaagcttacatttactgtttttttggtaactttttttgaatcttggcatctattacaaaaagacacaagtactaataacttattctcaatgtttgtttacaaactccttttctttccagctcgtctatccactggaaaaaaggagttaatcatgtacccttaaaaaagcattattacttttttttttttggagatggagtctcgctctgttgcccaggctagagtgcagtggcactatctcagctcactgcaacctctgcctcctgggcccaagtgattcttccacctcagcctcccgagtagctgggaccacaggctcacaatgccatgcctggctaattttttgtattttttttttttttagtagagatgggggtttcaccctgttgcccaggctggtctcaaactcctgaagtcaggcaatccacctgcctcggcctcccaaagtgctaggattacaggcatgagccaacatgcccagccgcattattacattttttaaaagctggatgtatccataggtccacgagggcccaaatggaaaaaaaaatgttcaaataacatgttcaaattttttttaaaaagatattggagaggagaaaagccaagagggatgacctgacacggtgaagaggaacttctccctgggagaccagacaatcaagaagaccagtactccaagcagattgtcagaaagaacacattgagagtgtgtggaggaaggacacagacactaggctgaagagagagaaatgtggaaaccctgcaaagggttgccaagcaccaggacttgttcctcgccttatgcagctcttggggaaagggtgagttaaataggcatggagtggttcactctcaccatggacctccagaatcctagctgcagaagaccccatgatcccctggacatctcagatggcagggagagctgtttgaagagctggcagagaggggactccagcctttgtgtagcccaaagggtttggcatgggaacaactgcagtgtagcatggccagggatgcccatcccccaaggctcaccccactcgtttaggtagctttggcgtttcttggctgttggacccaagtagaacagagctaccttgcccatgggatggagccattctgatctgaacacccccgtctgccagtctctcctagagtccctgcctggccccacccactaacagtgcagcctcagatgctcaaacaaggtgtttcccagtggccaccaccataggtccttcactggaagaccacacctaactatcagagagcttctgttcaagggaccccaacagcacacaactgtccacagcctgccctgactgcttcactggcacacacttgcctgcagcatcctcccaccattttgatggcatgtaactgccccaaatctgccaactgctttgctggtgcatgttagtgtgtgggcctcaccatcctggtgccatcagtgtaaatgtatgcacagatcctgctgagccaccaccctgccactgctggtgcacatgtggaccctgctgcaccactgtcccactgccaccagtgtgtgaacacgtgtggaccctgccatgctgctgccacttgtgtacacacaggcatgcacacaaatgctgccataccattgccctgttgctgctggaatgtacaagtgcacgccctgctgccattaccctgatgaagcccttttagcagcacccccatcaaagtgtttttgccagcagacccagaacgccttgctacctccagtgaagtggatgtttaacattgaagagccagagaacaaagccatgggcctggtcccaggccccagtgttggagtatacagcccaggagcactgagctgagcctcagccccctgaaattatccagttaaatagccagccaactgaacccaaatgtcaccacagtaaagtcctcaaggatatcaagaatataagagcaaaaagctccatcaaaagaatagcaaattcaaaaattaaagaaacatcactccacatagataagagaatcagtgctagaactctggcaactgaaagagcagacgtgtcttcctaccttcaaatccccaaactagctcctcattaatttagccagacagaaattactgaaatgtcagacatataatgcagaatctatatagcaatgaagatcactgagattcaggagaaagttgaaacccagtccaaggaatctaaggaaatcaacaaaatgatacaagagctgaaatacaagataaaaccactttaatgcaaaaccaaactgatctaatggagctgaaaaactcactacaagaattttataaaacattaacagcagaatagaccaagctgaggaaagaatttcagagcttcaagactggttcttcgaactgactcagtcaaacacaaatttaaaaaaagaactttgaaataaacaaaatctctgagaaataatacatttatgtaaagagactaaatctatcatgcattagtgtccctgaaatggagagaaagcaagcaacttggaaaacatatttgagaatattgttgatgaaaaatttctcagctttgctagcaaagtcaccattcatggtcagaaaatttagagaaccccttcaagatagacaagaaggccctcctcaagacacagagtcagcatattcttcagggtgaatacaaaataaaaaatactaaaggcaagtggagagaaagggcaggccacaaacaaagggaatcccatcagcttaacagcagacttttcagcagaaatcctataaaccagaagagattgagggcctatattctgtatccgtaataaaaaattccaaccaagaatttcatatccagccaaactaagcttcataagaaaaaaaaatctctaattcttttcagataagtaaatgctaaggcaatgatcaccagaccttccttaaaagagatcctgaggaaatgctaaacatggaaatgaatgactgttactagccaccagaaagcacatttacgtacatagaccaaggacactataaagcaactacaaaattaagtctacataaaaaccagctaacaatatggtgacaggattaaatgtacacatatcaataaattttgaatgtgaatggaaaaaatgggaataaatgcaccacttaaaagtcacggaatggcaagttggataaagaagcaagacaactgcgtgctctattgaaaatacccatcttacctgctatgacactcaaaggctcaaattataggaatatataaaaatttaccaactaaacaaaaaaagcagaatttgctattcttatttcagacaaaacagactttaatcaacattaatgagaaagaacaaagaaaggcattacacaatgataaagggttcaattcaagaagacttaactatcttaaatatgtatgcactcaacatcacagcacctagatacataaagcaagttcttagaaacctacaaagagacttagataccacataacaataccaaacaacttcaacaccccactgacagatcatcgaggcagaaaagtaaaaaaaagacactcaggagaataccccactaagatggccgaataggaactgctccagtctgcagcacccagcgtgagcgacacagaagatgggtgatttctgcatttccaactgaggtaccaggttcatctcactcgggcttgtcagacagtgggtgcagcccatggagcagggtggggcatcgcctctcccaggaagcacaagcggttgaggaattccctttcctagcaaagggaagccatgacagacagtacctggaaaattgggacactcccaccctaatactgcacttttccaacagccttagcaaacagcacaccaggagattatatcctgtgcctggctcagagggtcccacacccacagagcctcactcactgctagaacagcagtctcagattgaactgcaaggtggcagctaggcttggggaggggtgtctgccattgctgaggtttgagtaggtaaacaaagtggccaggaagcttgaactgggtggagcccactgcaactcaaggaggcctgcctgcctctgtggactccacctctgggggcacggtatagctgaacaaaaggcagcagaaacttctgcagacttaaacgtccctgtctgacagctttgaagagagtagtggttctcccagcacggagcttgagatctgagaatggacagattgcctcctcaagtgggtccctgacccccgagtagcctcactgggagacacctcccagtaggggccaactgacacctcatacagccgggtgcccctctgagatgaagcttccagaggaaggatcaggcagcaacaccttccgttctgcaatatttgctgttctgcagcctccgctggtgatatccaggcaaacagggtctggagtggacctccagcaaactccaacagacctgcagctgagggtcctgactgttagaaggaaaattaacaaacagaaaggacacccacaccaaaaccccatccgtatgttaccatcatcaaagaccaaaggtagacaaaaaccacaaagatggggagaaaccagagcagaaaagctgaaaattctaaaaatcagagtgcctcttctcctccaaaggaacgcagctcctcaccatcagtggaacaaagctggatggagaatgactttgatgagttgagaaaagaaagcttcaaatgatcagtaataacaaacttctctgagttaaaggaggatgtttgaacccatcacaaagaagctaaaaaccttgaaaaaagattagacaaatggctaactagaataaatagtgtagagaagtccttaaatgacctgatggagcttaaaaccatagcacaagaactacgtgatgcatgcacaagcttcaatagcagatttgataaagtggaagaaagggtatcagagattgaagatcaaatgaatgaaatgaagcgagaagagaagtttagagaaaaaagattaaaaagaaatgaacaaagcctccaagaaatatgggactatgtgaaaagaccaaatctacgtctgattggtgtacctgaaagtgacggggagaatggaaccaagttggaaaaccctcttcaggatattatccaggagaatttccccaacctagcaagtcaggccaacattgaaattcaggaaatacagagaacgccataaagatactcctcgagaagagcaactccaagacacataatggtcagattcaccaaagttgaaatgaaggaaaaaatgttaagggcagccagagagaaaggtcgggttacccacaaagggaagcccatcagactaacagtggatctcttggaagaaactctacaagccagaaggcagtgggggccaatattcaacattcttaaagaaaagaattttcaacccagaatttcatatccagccaaactaagcttcataagtgaaggagaaatagaatcctttacagacaaacaaatgcggacagatgttgtcaccactaggcctgccttacaagagctcctgaaggaagcactaaacatgcaaaggaacaaccagcaccagccactgcaaaaacatgctgaattgtaaagaccatcagtgctaggaagaaactgcatcaactaatgagcaaaataaccagctaacatcataatgacaggatcaaattcacacataacaatactaaacttaaatgtaaatgggctaaatgctccaattaaaagacacagattggcaaattggataaagagtcaagacctatcagtgtgctatattcaggagacccatttcatgtgcagagatgcacataggctcaaaataaaaggatggaggaagatctaccaagcaaatggaaaacaaaaaagaagcaggggttgcaatcctagtctctgataaaacagactttaaaccaacaaagatcaaaagagacaaaaaaaggccattacataaaggtaaagggatcaattcaacaagaagagctaactatcttaaatatgtatgcacccaatacaagagcacccagattcataaagcaagtccttagagacctacaaagagacttagactcccacacaataatcatgggagactttaacaccccactgtcaacattagacaaatcaatgagacagaaagttaacaaggatatccaggaattgaactcagctctgcatcaagtggacctaatagacatctacagaactctccaccccaaatcaacagaatatacattcttcttagcaccacaccgcacttactccaaaattgaccacatacttggaagtaaagctctcctcagcaaacgtaaaagagcagaaattataacaaactttctctcagaccacagtgcaatcaaactaaaactcatgattaagaaactcactcaaaaccactcaactacatggaaactgaacaacctgctcctgaatgactactgggtacataatgaaatgaaggcagaaacaaagatgttctttgaaaccaaagagaacaaagacacaacatatcagaatctctgggacacatttaaagcagtgtgtagaaggaaatttatagcactaaatgcccacaagagaaagcaggaaagatctaaaattgacaccctaacatcacaattaaaagaactagagaagcaagagcaaacacattcaaaagctaagagaaggcaagaaataactaagatcagagcagaactgaaggagatagagacacaaaaaaaacccttcaaaaaatcaatgaatccaggagctgatttttagaaaagatcaacaaaattgatagaccactagcaagagtaataaagaagaaaggagagaagaatcaaacagatgcaataaaaaaaatgataaaggggacatcaccaccgatcccacagaaatacaaactacgatcagggaatactataaacacctctacacaaataaaacagaaaatctagaagaaatagatgaattcctggacacatacaccctcccaagactaaaccagggagaaattgaatccctgaatagaccaataacagattctgaaattgaggcaacaattaatatcctaccaaccaaaaaaagtccaggacaagatagattcacacccaaattctaccagaggtacaaagaggagctggtaccattccctctgaaactatctgaatcaataggaaaagagggaatcctccctaattcattttatgaggccaacatctcctgataccaaagcctggcagagacacacacacaaaaagagaattttagaccaatatccttgatgaacatccacgcaaaaattcccaatataatactggcaaaccgaatccagcagcacatcaaaaacttatccaccacgatcaagtgggcttcacccctgggatgcaaggctggttcaacgtatgcaaatcaataaatgtaatccatcatataaacagaaccaaagacaaaaagcacatgattatctcaatagacacagaaaaggcattcaaaaaattcagcagcccttcatgctaaaaactctcaataaactaggtattgatgggacgtagctcaaaataataagagctatttatgacaaaatgatagccaatatcatactgaatgggcaaaaactggaagcattccctttgaaaactggcacaagacagggatgccctctctcaccactcctgttcaacacagtgttggaagttctggccagggcaatcaggcaagagaaagaaacaaagggtatttgattaggaaaacaggaagtcaaattgtccctgtttgcagatgacatgactgtatatttagaaaaccccatcatctcagcccaaaatatccttaagctgataagcaacttcagcaaagtctcagaatacaaaatcaatgtgcaaaaatcacaagcattcctatactccaataacagacaaacagagagccatagcatgagtgaactctcattcgcaattgcttcaaagagaataaaatacctaggaatccaacttacaagggatgtgaaggacctcttcaaggagaactacaaagcactgctcaacgaaataaaagaggacacaaacaaatggaagaacattccatgctcatggataggaagaatcaatatcgtgaaaatggccatactgcccaaggtaatttatagattcaacgccatccccatcaagctaccaatgactttcttcaaagaattggaaaaaagtactttaaagttcatatggaaccaaagctggaggcatcatgctacctgacttcaaactatactacaaggctacagtaaccaaaacagcatggtactggtaccaaaacagagatatagaccaatggaacagaatagagccctcggaaataataccacacatctacaaccatctggtgtttgacaaacctgacaaaaaacaagcaatgaggaaaggattccctatttaataaatggtgctgggaaaactggctagccatatgtagaaagctgaaactggatcacttccttacatcttatacaaatattaattcaagatggatgaaagacttaaacgtcagacctgaaaaccataaaaactctagaagaaaacctaggcaataccattcaggacataggcatgggcaaggacttcatgactaaaacaccaaaagcaatggcaacaaaagccaaaattgacaaatgggttctaattaaactaaagagcttctgcacagcagaagaaactaacatcaaagtgaacaggcaacctacagaatgggagaaaatttttacaatctacccatctgacaaaggtctaacatccagaatctacaaagaactttaacaaatttacaagaaaaaaatcaaacaaccccatcaaaaagtgggcaaaggatatgaagagacatttctcaaaagaagacatttattcagccaacagacacatgaaaaaatgctcatcatcactggccatcagagaaatgcgaatcaaaaccacagtgagataccatctcacaccagttagaatggcgatcattaaaaactcaggaaacaacaggtgctggagaggatgtggagaaatagcaacacttttacactgttggtgggactgtaaactagttcaaccattgtggaagacagtgtggcgattcctcaaggatctagaattagaaataccatttgacccagccatcccatcactgggcatatacccaaaggattataaatcatgctgccatgaagacacatacacacatgtttattgcagcactatccacgatagcaaagatttggaaccaacccaaatgtccatcaatgatagactggattaagaaaatgtgatacatatacaccatggaatcctatgcagccataaaaaatgatgagttcatgtcctttgtagggacatggatgaagctggaagccatcattctcagcaaactatcgcaaagacagaaaaccaaataccgcatattctcactcataggtgggaattgaacaatgagatcacatggacacaggaaggggaatatcacactctggggactgtggtggggtggggggaggggggagagatagcattgggagatatacctaatgctagatgacgacttagtgggtgcagcacaccagcatgtcacatgtatacatatgtaactaacctgcacaatgtgcacatgtaccctaaaacttaaagtataataaaaaaaaaaaatacattactcctttccgaaaaaaaaaaaaataataattctcaaataacttaaaatagcactaccattcaacccagcaatcccattttttggttatataccaaaataaataaatactattttccccagaagacacatgtttgtttttgttcattgcagcgatattcacaatagcaaagacatgcaatcaaacctaggtgcccatcaactgtagcctggataaggaaaatgtggcacatatacactatgaaatactatgcagtcataaaaaaagaatgaaatcatgtatttttcctaccaacatagatgcagctggaggccattaccctaaagtgaattaattcaggaacagaaaaatcaaatactgcatgttctcatgtataagtgtgagctaaacttttgagtacacataaacacaaaaaggaaaaccataaatgccagggcttacttgatggtgaagggtgaaagttagaatcagaaaactacttattgggtactatgctcactacctgtgtgataaaatcatttttacaccaaaccccagtgacacacaatttactcatgtaagaaatatgcacatgaacccctgaacttaaaagttggaaaaaaaccttggtcttctcttaaaattactgggtttcttttggagagactataataagagtttataaaaggctttttaaaactctctttacacaaacttcttggaaaaaaaaattctgtgtttaatcaaaataatttattgtgctctgtattttattaggtcttctgattagtaagaaaactgagtcttcctaatattaaaaaatttagagttttttgagaactatgtaacttttctgtatttgcctcttttttcataacgtgattccattaagtgttttaaatattttgtttgatatttttgacaaagttctcaaaagaaacttttaattaagtctttctgaccttgaattaacttacaataactacagagggtccctgagacatctgagatttgaaaaagagagatattaagctagtttgaattatttggtatgtaaaattatatgtgaagaaatgtcaaataagaaatgtttaattttttttcaatatgacattggaggcaatgttagcatgtgtctcccatgcagaaaggcaaaacatttgtaaatattcatgctgtgaacctttttccaagatgcagcacagaaatttatcagaaaaactgaaagaaagcatagactgtttgaatgaagtggtgggctgcagcttacactgtgagccaggcagaaaacatccaacaagagacaatgaacctattcatgaacccagcacatcactactacaaccagagtctcagaaagccatcacacaaaaattctctataaccaagaaattcatacagagtctttgccactgaaagcactcagagctggaactaggtaacaataatctgtaaacattaaaatcacattcttgaccatgtgtggtgactcacacttgcaatcccagcactttgggaggcagaggcaggtggataacttgaggtcaagagttcgagaccagcctggccaacatcatgaaacctcgtctctaccaaaagtacaaaaattagccgggtgtggtgacacgtgcttataatcccagctactcaggaggctgaggcaggagaatcacttgagcccaggaggcaaaggctcctgcactccaggctgggtgacacagtgagactttgtctcaaaaaaaaaaaatttacgttctgaagaaaaaaaaaaccagtataatcaaccacaaattcaaaagtaattacaagaaatagtctacaccaaagagaaagaaccaaaaaaccaattctagcaatatgaagaaaaaaaaaaaccccaggattttctaatcctctaaaaaggtcacactaactgtccagcagtggatccaaactaagatgaaatccttgaaataccagataaaaaattcaaaaagttcattaatttgttcaaggagatacaaaacaaaggtaaaaaccaacataaagaaattttaaaaattcaggatattaataaaaacttttctaaagagatagattattttaaaggaaactcaatcagaacttctgcaatcaaagacacttttagggaactacaaaattcagtagaaaattttaacaacagactagaccaaatataagagagtttaagagcttgaagacaaaacttttgtattaaccgaatcagaaaaaaaaaatcaaaaatgatcaaattcctcaatgaataggagattatgtaaaacagccaaacccaagaacaaaaggtatttctgggtgagaagaaaaaacaaaattttagaatacctatttgagagaattattggtaaaacttccttggtgttgctaaatatctagatatccaaatacaagaagctcaaaaaacttctgtaagattaattccaaccagtatatcaccaaggcctaagtttaatgtgaaggaaagaattctaagagcagtgagacaaaagcatcaggtaacttatgaattaaaacctatcaggttaacagcaaacttctcaacagaaaccttacaagccagaagtgattgggatgctaactttagccttctaaaaaaaaaaaaatgactgtcaaccaagaattttatatccagtcacactgttacataaatgaagggaaaaaagtatttctcagataagcaaatgatgaggaaatttgtcactactagacaagtcctacagaaaatgctaaaagaaaaaattcaatttagaaacaaaaggttgatacacactacaacagaaactcttaaaagcataaaactaacagggcttataaaacaataacacaatggagaaaacaaagtcacttgataacaacatgatgactggaaaattacctcacatctcaataccaacatagaatgtaaatggtctaagtgctctacttaaaaaatacagacaggtagaataaaatatattacaaaacaaatatctgccttcttcaggagacacacctaatacataaagattctttaaaattcaaagtaaaggggtaaaaaaagatatttcatgcaaatggaaaccaaaagcaaataggagtagatattcttataacagaaaaacagactttaaagaaacaacagtaaaaaagacaaagaagaacattatacaataatacaataatcaactatatgataacatatgataatcctaaatatatatgcattttactctggagctcccagattcataaaactattactactagactaataaaagagatagacagcaatacaataataatggggaattcaatattctactgacagcactagacagatcatcaaggcagaaagtcaataaagaaaccctggacttacactgtagtctagaacaaatgggcctaacagctatttagaaaacattctacccaagacgtacagaatatacactcttctcagcaacacatgaaacattctccaacatagaccatataatatcccacaaaacaagtatcaatatttttttaatattgaaattatatcaagttgcttcacagaccatagtggaataaataaaactaaaagtcagttacaaaaggtcccttaaacctatacatgtacatagaaattaaactgtctgctccggaataatttttggattaacaatacaatcaataaaattttaaaaatatttgaaatgaatgataacagggaaacaaggtatcaggacctctggaatacagcaaaaccagtgctaaaaggaaaattcacaatgccaaatacctacatcaaaaaggctgaaaagaatctggatggcaagaaagatcatcgagattcaggagaaagttgaaacccattccaaagaaactaaagagtccagtataacaattcaaaaaatgaaagatataatagccattttaatatagaaccaaactgagctaatagagctgaaaaactcactataagaattttacagcacaaacagaagtactttttatttaaattttaattgaagttcaggggtacataaacaggttttatataagcaaatgcatcatggcagtttgttgtacagattatttcatcacccaggtattaagcatagtatccattgttattttcctgatcctctccctcctacaaacctcctctctttgataggcagggggtgttgttcccctctatgtgtccatgtgttctcatcatttagctctcatttacaagtaagaacatgtagtatttgtttttctgtttctgcattagttttctaaagataatagcctccagctccatccttgctcctgcaaaggacatgatcttgtttgttttcataactgcatactattccctggtgtatatgtaccatattttctttatccagtctgttactgataaacatttaggttgattccatgtgtttggtattgggaataatgctgcatgcatgtatctatataatagtagaatgttttctattcctttgggtatagacccagtaatggaattgctgggtggaatggaaattctatttttaggtctttgaggaattgccacactgtcttccacaatgattgaactaatttacacttccaacaatgtatgtgttcttttttctccacacctctgccagcatctgttattttttgactttttaatactagccattccaactgatgtgagatggtatctcatggtggttttgctttgcatttccgtaatgctcagtgaagttcagctttttaaaatatgcttgttggatccacatttgtcttcttttgaaatgtgtctgttcgtgtttattgcccactttttatttttttattttttattattatactttaagttttagggtacatgtgcacaatgtgcaggtttgttacatacatatacatgtgccatgctggtgtgctgcacccattaactcgtcaattagcattaggtatatctcctaatgctatccctcccccctcccccaccccacaacagtacccagagtgagatgttcccttcctgtatccatgtgttctcattgttcaattcccacctacgagtgagaacatgcggtgtttggttttttgtccttgagatagcctactgagaatgatgatttccaatttcatccatgtccctacaaaggacatgaactcatcatttcttatggctgcatagtattccatggtgtatatgtgccacattttcttaatccagtctatcattgttggatatttggattggtttcaagtctttgctattgtggatagtgccacaataaatatacgtatgcatgtgtctttatagcagcatgatttatagtcctttgggtatatacccagtaatgggatgggtatatacccagaaatggtatttctagttctagatccctgaggaattgccacactgacttccacaatggttgaactagtttacagtcccaacaacagtgtaaaagtgttcctatttctccacatcctctccagcacctgttgtttcctgagtttttaatgattgccattctaactggtgtgagatggtatctcactgtggttttgattcgcatttctctgatggccagtgatgatgagcatttgttcatgtgttttttggctgcataaatgtcttcttttgagaagtgtctgttcatgtcctttgcccactttttgatggggttgtttttttttttcttgtgaatttgtttgtgttcattgtagattctggatattagccctttgtcagatgagtaggttgtgaaaattttctcccattttgtaggttgcctgttcactctgatggtagattcttttgctgtgcagaagctctttagtttaattagatcccatttgtcaattttgccttttgttgccattgcttttggtgttttagacatgaagtccttgcccatgcctatgtcctgaatggtaatgcctaggttttcttctagggtttgtatggttttaggtctaacgtttaagtctttaatccatcttgaattaattttcgtataaggtgtaaggaagggatccagtttcagctttccacatatggctagccagttttcccagcaccatttattaaatagggaatactttccccattgcttgtttttctcaggtttgtcacttacaagggacttgaaggacctcttcaaggagaactgcaaaccactgctcaatgaaataaaagaggatacaaatggaagaacattccatgctcatgggtacgaagaatcaatatcgtgaaaatggccatactgcccaaggtaatttatagattcaatgccatccccatcaagctaccaatgactttcttcacagaattggaaaaaactactttaaagttcatacggaaccaaaaaagagcctgcatcgccaagtcaatcctaagccaaaagtacaaagctggaggcaccacgctacctgacttcaaactattctacaaggctacagtaaccaaaacagcatggtcctggtatcaaaacagagatatagatcaatggaacagaacagagccctcagaaataacgccgcatatctacaactatctgatctttgacaaacctgagaaaaacaagtattgcccactttttaatatcgttggttgttgtcttctcataaatttaagtttcttatagatgctgaatactagacctttgtcagatgcatagtttgcggtatttttctcccattctgcaggttgtctgtttgctctgttgattgtttcttttgctatgaataaatgctttagtttagttagatcctatgtgtcaatttttgcttttgctgcaattgtttttggcatctttgtcataaaatctttgctcatgcctatgtcctgaatggtattgtctaggttgtctttcagggtttttatagttctgggttttacatttaagtctttaatccatcctgtgttaatttttgtatatggtgtaaagaaagggtccagtttcaatcttctgcatatggctagctggttatcccagaaccatttattaaacagagagtccttttccgattgcttgtttttgtcaggtttgtcaaagatcagatagttgtaggtgtgtggccttatttctgggttctctattctattccatagatctatctgtttttctaccagtaccatgctgttttggttactgtggccctgtagtatagtttgaagtcaggtagtgtgatgccttcagctttgttctttatgcttaggattgccttggctattcaggctctttcttgattccatatgaattttaaaatagtttttttcaattatgtgaagaatctcagttgtagttttatagaaataacattgaatctacaaattgctttggccagcatggccattttaacaatattgattcttcttatctcttgagcatggaatgtttttccacttgttcatgttatctttgatttcttggagcaatgttccatatttctccttgtagagatctttcacctctctggttagctgtattcctaggtattgtattttatttttttgtggcaattgtgaatgcgattgaatttctgattaggctcttggcttgactgttgtcagtgtataggaatgtcaataaattttgcacattgattttacattctgagactttgctgaaattttttaggataatggagcttttgggctgagattattgagtattttagatatagaatcatgtcatctgcaaacagtgatattttgacttcctctcttcttatttggatgccttttatttctttctcttgcctgattgccctggctgggacttccaatactatgttgaataggagtggtgagagagagcatccttgccatgtgccagtttacaagaggaatgcttgcatcttttgcccattcagtatgatgtttgctgtggtttcatcacagatggctcttattattttgaggtacgtttctttaatacctagtttattaagagtttttaacaagtagtgttgaattttaccaaaagccttttctgcttctattgagataatcatgtggcttttgtctttagttctgtttatgtgatgaatcatatttattgatatacaaatgttgaaccaaacttgcaacccaatggataaagcctatttgatcttagtggatgagcttttggatgtgctgctggattcagttcgccggtattttcttgaggacttttgcatcgatgttcatcaagatattaagctgaagttttatttttttgttgtgtccctgccaggttttggtatcaagatgatactggtctcatagaatgagttagggaggagtcccttctcctcaatttttttgaaatagtttcagcaggaattgtgccagctctttgaacatcttgtagaattcagctataaatctgtctgatcctgggatttgttttgttttttaggcaatttattactgactcaatttcagagctcattattggtttgctcaggtatgcaattacttcctggttcagtattgggagggtgtacatgtctaggtatttatccatttcttccagactttctagtttatatgcatagaggtgtttataatattctctgatgactgtctatattcctatggggtgactggtaatatctcccttgtttcagattgtatttctctgaatgtttttcttctttattagtctagctgtggtgtctgtttcatttttttcccaaaaagctagctggagaattcattgatcttttgaataaattttcatgtttcaatctccttcagttcaactctcattttggttatttcttgtcttctgctagctttaagattttttactcttgattctctagttctcttagttgtgatgtcacattgttatcttgagatttttctacctcaagttagaagtagaaacttctttctacttttgaggtgataatttagtgtcccagagattctggtatgttgtttctttgttctcattagtttcaaaaaacctcttgatagctgccttaatttcattatttacccaagagtcattcatgagcaggttattcaatttctatgtaattttatgattttgagtaaatttcttagtctttctttctaatttgatttcaccatggtctgagtgattgttatgatttcagttttttgcatttgcgaaagagtgttttacttctgattatgtgactgattttagagtatgtgccatgtggcaatgagaagaatgtatattctgttgtttttgggtggagagttctgtagatgcctatcaggaccatttgatccaatgctgagttcagagcctaaacatctttgttaatctttcatctcaatgatctaatattgacggtggagtatttgtctctcaatattattgtgtgggagtctaaatctctttaaaggtctctaagaacttgctttatgaatctgggtgctcctgtatttggtgcatatatattcagaatggttggaatttttgttgaactttttaccattacataattttttccatttgcttggtaaatttttctccatccttttattttgagcctatatgtgtcaatgcatgtgagatgagtcttttgaagacagcagcccaaggggtcttggttctttatccagcttgccactctgtgtcttttaattgggggcatttggcccatttacattcaaggttagtattgatatgtgtggatttgattctgtcatcatgatgttacctgaattttcaaacttgtttatctggttgctttatattgtgactggtctgggtccttcagtgtgtttttgtcaggagctctgggaagttatgtctggtggtaacaaatttcctcagcacttacttgtctgaaaagaattttatttcttctttgctcaggaagctttgtttagccagatataaaatattgggtggggatttgttttctttaaaaatgttgaatattggcccccaatctcttctggcttgtagaatttctgatgagagatctgccgttagtctgatggggttccctttgtcagtaacttaacatttctctctagctgcctttaacatgttttttccattttgaccttggagaatctgatgattaaatgtcttacggttacctttttgtgaagtatcttactggggttccctgcatttcctgaatttgaatcgtggtctctctagctaggttagggaagttgttatggatgatatctcgaaatacattttgcaagttggttccattctcccccatcactttcatggacaccaatgattcacagagtctgtctctacataattccatatttctcagaggttttgttcattttttttgccattcttttttctctgtttgtctgactgtcttatttatttcagcaagccagtcttcaagctctgagattctttcttccacttgctctattctgctttcagctccatcaggttggttatgttccttactatgctggctgttttgactgtcagttcctgtattgtttaatcatgatttttagcttccttggattaagtttcaatgtactcctgtagttcagtgatctttgttcctatctatgttctgaattctaattctgtcatttcagccatctcagctcacttcagaacctttgctggagagctgatgtgttcatttggaggaaaggaggcactgtggctttttgagttttcagggttcctgcactgatcctttcattttcgtgggcttattaccttcaatctgtgagacttctgacctatggatgagtttttttcttttatcctaattgataaccttgagggtttgattgtggtataaggtggattcagctgactggcttcatttctggaagatttatggtggccaacactcaactcccagctcctggactgcatgctctaaatctgggtgacttgtattctgtcccaactttgttctcttgctctttgaagtcaggaacccactgtgctgggggccaggggaagggaatatgctcctagtccactggtcactacactctgataggctgtgtcagccaaagtgttttgaagtgcagggacagtgggatccatcctccttcacacatgccgacagcaatggtagtggtagctgtggcagagtgataccaggtactaaggtatctgcctcccttcaaacctcaggtcctcgccaaagcttcttatacccttagttgactgccaggttgttgcaagtgcctaataacaggcacaatttcagaaagacccacaagatgtgaaattggctcaaactactgtggtaagtgtatcagaagtattaacagcagaataaaccaagctgaagatacaatttcagagcttgaagactggtctttgaatgaactcagacaaaaataatgaaaaaaggattttaaaaaatgaaaaaatttagaaatataggattatgtagagagatcaaatctatgacacattggcattcctgaaaagagagagagagcaatcaatttggaaaacatatataagaatattgtccatgaacatttctctaactttcctagttgagacttagcttcacatttcaccaaatggacctaacggacatctccacgatactccacataacaaaaacaaacattcaaattcaagaaattcagagaacatctgtgagatactctaatgactaagaaacatagtcattagagcctccaaggtcaacatgaaacaatattaatggcagctagagagaagtagcaggtcacctacaaaggaacccaatcaggctaacagcaaatctttcagcagaattctaagccagaaaagactgggggcctatattcaaaattcttaaagaaaataaagtccaacaaagaatttcatatctggccaagctaagctttatatataagtgaataagaaatgaaattcttttaagacaagcaaatgctaagggaatttgttaccaccaggtctgccttacaaaagatccttaagagagagtgaaacatggaaataaatgttcttttccaatcaccacaaaacacactcaagtacctagaccatggacactataaagcaatatttaatcaagtctacttaacaaccagctaacagcataattacagggtcaaatctgcacatgtcaatattaaccttgaatgtaaatgaattaaactccccatttaaaaggcaaagagtgacaggttgtgcaaagaagaagactcaactgtatgctgtcttcaagagacccttctcacatgcaagaacacccacaggctcaaaataaatggatggagacagaccaatcaagcaaacagaagaccaaaaagagcagggtttgctatttttactgcagacaaaattaactttaagccaataacaatcaaaaaagataaataagggcattacataataataatgtgttcaattcaactagaagatttaactattctacatctctatctatctatctatctatctatctatctatgtatctatctacacatctaacactggagcacccatatttataaaatagctcttacagacatacaaagagactcagataacatcacaaaagaagtgggagacttcaacaccccagtgacttttggacacataatcaagacagaatactaacaaagatatttgagacttgacatttcaccaaatggacataacagacatcgccataacactccacataacaaaaacaaaatattccctcttctcacattcacatggcacatgctataaaattgaccccatgcttggccaaaagcagttcttaacaaattaaaaagaaaaaatcataccaaccatactcttggaccacagcaaaacaagaatagaaaccaataccaattagatctctcaaaaccatacaattaaatggaaattaaacaatctgttcctgaatgacttttaagtaaacaaagaaattaaggcaaaaattaagaaattctgggaaactaataaaagcaaagaaacaatgtaccagaatctgtgagacataactaaagtaatgttaagaggaaagtttgtactgcaaaacacccacatcagaaacatctcaaattaataacatattataatatcacacccagagaaacttgaaaaaacaagagaaaatcaacctaaaattcacataagaaaagaaataggtcaggggtggtggctcaagcctgtaatcccagcactttgggaggccgaggtgggcagatcacctgaggtcgggagttccggaccagcctaatcaacatggagaaaccccgtttctactaaaagtacaaaactggccaggtgtggtggtgcatgcctgtaaccccagccactccggaggctggggcaggagaatcacttgaacctgggaggcagaggttgcggtgagctgagatggcaccaatgcactccagcctgggcaacaagagtgaaactccatctcaaaaaacaaaaacaaaccaacaaaaaagaaataacaaaagtcagagctgaaataaatgaaatggagatgaggaaaactatacaaaaaatcaatgaaacaaaaattgttttttctaagaataaagaagactgatagacttctagctagactaataaagggatcaagggagaaaatccaaaaacctacaatcagaaatgaacatggagacattactactgaccttacagaaatacaaaaaaaaaaaaaaaaaaaaaaaccctcagagactattatgaacaattctatgcacaaaaactagaaaatctagaagaaattgataaattcctgcaaaaatgccacttcccaagattgaactaagaagaaattgtaaccctgaacagaccaataatcagtttcaaaattgcaccagtagccaggcacagtggctcattctttaatctctgaactttgaagactgaggcaggtggatcacttgaggctaggagtttgagaccagcctggccagtatagcaaaaccctgtctctacagaaaatacaaaaattagccaggcatggtggcacatgcctgtgatcccagcaacttggtaagctgtggcacaagaatcacttgagcctgggacacagaagttgcagtgagccaagatcatgccactgcactccagcctgggcaacaaagtgatactctgtttcaaaaaacaataataattgaaataaataaaaatgataaaaaaatttgcaccagcaatataaaatctatcaaccataaaaagcccttgaacacacagatctacagtcaaattctaccatatatgtatagaagagctgggatgaatcctaccgaaactatttcaaaaaattctgaactcattctatgaggctaaaatcattctgataccaaacttctgcagagacacaatgcaaaaagcaaacttcaggccatgactccgaatatctggaacagctcagaaatctgggtgcagaaagctagggacaagcctagccagtcaagttgcctccagggcagatgccagaggcagattcactgggctgggagagtgcaagctgaatagaccccacaaccatctgctgagctgaaaaccctgggccatgggtgccttcccagttgcatatcattgggtatctctgccctgccagaaactcctccactccttgacccactgcaccagtagacataccctacaacccactcggactctctcaagcacagggaactggcaagcccctggggagttgtgaatctactggtgacccaacacttagctggtaccacccctaaggaaggagagagtgcatcctaccaaatctcccattggggcaaagaaaacacaggcatggcaccagtttttgaaggggatggcaccaagtcctgcgaatgaaattggagagggagtcatctcttgcccctgccttctttccctgctgcataagcactgaaaaagttgtgaacagcagagttaagagcttatctgctggcccttactctagtggactacatcctaagttataccaccaaacacaagtacattcctccaataggcaatgcctctgaaacccaccagagtaacgtatatacaacctaggaacccataagtacagagccttggccttctgaaagcactcagaaatgaagccaattgactatacactatattcaccagtcaaactctcaagtggagcaagaataaaaaaacaaaaaagtcccatccaaatgacagcaaactaaaaaaaaaagacagctctctcagatgagaaaaaattagcacaagaactctggcaatcaaaaatgtcagaatgttttgttacctccagaagatcacactgattccctagtaattaatcccagccagattgaaatgtctgaaattaaagacacataattcagaatgtgggtgtcaagaaagctcaaagagatttaagagaaagttgaaaccaatgcagggaagccagaaaaaaagatccaagatttgaaagacaacataagcatattaagaaagtaccaaattgaacttctggaattaaaaaattcactacaggagtgtcaaactacagtcggaatcttgaacaacagactagaccaagcagagaaaagaatttcagagctctaagacaggtccttcaaatcaacccagtcagacaaaagtaaagaaaaaagattaaaaattgaacaagaaaatccaagaaatatgggattatgtaaaatgaccgaacctactactcatgggcatttcggagagaaaagaagaaagtgtaagcaactggaaaacttatttgaagatgtaactcataaaaatattcccaatctcactagagaggtcaacatgcaaacacaaaaaattgagaaaacccctatgagatactatacaagatgatcatccccaaggcatatagttgtcagatgttctgaggtcaacacaaaagaaaacattttaaaggtagccagagagaagggtcatatcacctatgaaaggaaaccccatcaggttaacagtggacttctcagtagaaatgttgcaagccacaggattctattctattctattctattctattctattctattctattctactctattctattctaattttgagacagaatcttgctctgttgcccaggctggagggcagcggcacaatctcggctcactgcagcctcctcctcctcagttcaagtgattctccagcctcagccgcccgagtagctaggactacaggcacccgccaacacgcccagctaatttttgtttgtttagtagagatggggtttcaccatattagccaggctggtctcaaactcctgacttcaggtgatcaacccaccttggcctctcaaagtgctgggattacaggtgtaagccaccgtgcccagccaaaatttcatccctattattagcattcttaaagaaaacacattccaattaagaatttcacatttcactaatctaagcttcataagcaaaggagaaataaaatctttttcagacaagcaattgctaagggaatttgttaccactaggctggccttacaaaagatgcttaagaacattctaaacttggaaacaaaagaaagatacctgttactacaaaatacatgtaaataaatagcacacagaccctataaagcaaccacacaatcaagaccacaaagcaaacagccaataacaccatgacaggaaagaaaactcacatatcaatattaaccttgaatataatgatctaaatgcccccacttaaaaggcacagagtaccaagtttgattttaaaaaatccaaccttctaatgttttcaaaagatccatctcagatttaactacacacataaactgaaagtaaaaggatggaaagaaaactattatgcaaatggagaacaaaaaacaccagggcttacaattcttttatcagataaaagagactccaacaacagcaaaggagaaagcaggtcattagataattataaagggtttaattcaatcataagccttaactatcctaaatatatatgcactcaacattgaataacccagattcataaaacgaatacttctagaccaacgaaaagacccagagagccacacagtaatagtgagggatgtcagtatttcactgacagtgctatacagatcactacggcaaaaaaaacaaaaaccaaaaaacaaaacaaaacaaaaaaacctaacaaattctggacttaaatttgacactagacctagaccaatcagatataatagacatctacagaatacgtcatccaagaaccccacattatgtatttatctcattcacacatggaacatactccaagattgaccacatgcttggcaataagtcaagtctaaatgaattttttaaaaaatcaaaattatatcaagcatactattggaccccagtatattaaaagtagcaatcaataccaaaagaaactctcaaaatcacaaaattacatgaaatctaaacaacttgatcattattgaattttgggcaaacaatgaaattaaagcagaaatgaagacttttttgaagctaattagacacagcaaacctaaatctctgggaggcagctaaagcagtgttaagaggaaaatttatagtgctaaatccctttatgaaaaagttagaagatccccaataaacgacctaacagtgcaactgaaggaactagagaaaaaaaaatccaacccaaaagctagtagaagaaaagaaataactaaaataagaggagaatgaaatgagactgagatgcaaaaggccatacaaaagatcaatgaaaccaggagcttgcttttgaaaggaatagattggtacaccattagctagattaatcaagaaaaaaaaagaatcaaaataagcacaatcagaaataaaaaaggtgatattaaaactgatcccgcagaaatctgaaagatcctcagagactccaaaccaaatccagtagcaaattcaaaagttaattcaccataatcaagtaggctttattcctgggatacagggctggctcaacatatgcaaatcaataaataaaattcaccacataaacaggatgaaaactaaaaacatgattgtctcaatagattcagcaaaaacgtttgatggatttcagcttccttcatgatagaaaccctcaacaaagtaggcatcgaaggaatataactcaaaagaatcagaaccctctgtgacaaacctacagctaacattggaatgatgggtaaagctcaaaccattccccttgataactggaagaagacaagaattcagactctcccaactcctattaaacatagtactggaagtcttagctagagcaaacagcaagagaaataaataaaaggtgtccaaattggaagagaggaagtcaaattattccatttgctgatggctttctatcctgggttctctattctgttccactggtctttggtgtgatttattttggagaatatttcatgtgcagatgagaataatgtatatcctgccattgtgtaaaatgttctgaaaatgcctgttgggttgatttggtctgaagtctaatttaactgcaatgtttctgtgctgattttctgcctcagcattgtcaacagtgttaataccccattattattgctgtctatctgttctcttaggtctatcagtatttgttttatgaatatgggtgctccagcattgggtgcatatacatttagatagttatgtcttcttgttgaattgagccctttgttattatgtaataatcttctttttttaatgctgttgatttagtctgttttatttcatataagtttggctatttcagctcattttggttttccatttgtgtggtatatcttttcccactggttttctttgaggcttggctttttaccattaaagcgtgtctcttgtaggcagcaaatgtttggatcttacttttcttatttaatttgccagtctatatcttgtaagtggaatatttaggccaattacactcaggggtaatattgaaatgcaatgtttttattgctgtcataatgtttttacctggttgttttgtagcaacaattgtataattgctttatagactctgtgatctttttacttatgtgtgcttttatgatggcaaattttgtccttttatttctgtctttagaactcttttgagcatttcttgtaagtccagtcaagaggtgacaaattcccttagcatttgcttgtctgagaaatactttatttctccttcatttatgaagcttaatttagccaaagccaaaggttttggttggcagttctttgctttaagaagacagaaaatcgaagcctgatctcttctgggttgtacagtttttgccaagaagtccactgtcattctgatgagacagtctttataggtgctttgatacttctctctagctgatttcagcatttgttcctttatgttaactttggtttgtctgatgaatatatgccctggtgagatccatcttgcagaaaatctttcaggtgttatttgcacttcttatatctgaatgtctaattctgtatctagatcagaaaagtttcttgagttaactaatcagatacatttcccatgctttttactgtttcttcttctcactcagaaatgcccatagcttgtaggtttgattactttacataatcccacatttcttgagggctttttaaattttttatattctttttttcctaattttcttatgactgggttaattcaaaggactgggctttcaggtctgaaattctcccttctgcttgtctggtttattgttaaaatcttcaactacattttataattccttcaatgaatttttcacttccagaagttctgtttcttttttaaatatctctttagtaaattttgtattaatatccttaattgttattctgatttctttatgttggttttcaactttctcttggatctcattgagcttccttacaataaaaaaaatttgaatttttttttatgtgtcactttagttttatttgttagaatccattgcttcagaactgctgtgatcctttgtgggtgtcaaaacactctgtctttctgtactgctgaagttctcacattatttctcatttatagaagctgtcacttagttattttctatttgctttcatttgaagaacattttcaattttcaattcttttctcttttgggggtgtgattatatgttgtgtgtaatcatttggcttcaattctgggtgccttcagggggctaaggctctagatgagtttcttggttatagatagtttttgtgcagtggctttctcaaatgctgattgttgtaccaatatattgggcatataatttgactcactatcttttgcagggctgggagtgcagaagcctcaggaagattatctcattccctagtatcatgcccttctgccaacaggttttgtatatggttatgcagttcagtttacggtttagtagttggcacttactagcagacactggcttgttgttttgacaatttgatgactagcaaaagcccctcccctgaagggggtggtgggaaagctcactgtgggatgcacacaggtctctgccaagtggtagaggtgtgaagggtgttgcactagctcctcatcctagggatgtaacttacatccctatctactcctgttcaagggctcacaacctgcagttcagatagacaatgtcctttatctccacgctgcaatgcaactaggtttcgtagaaaacattcatcctgtggctacagctgaaagggcctctggaaaaaacctcttcccacagcttgaaatagacagctgtagctggtctatactctgtagctggttcattctatggtgcagaaatgctgctgctttgtatggggaggaagagataagtcccaccctttgagcaagtccaggttggtggggacactttcaactggggtgcagctgccctaagtgtactgaaaagcctgtttccaagtgcatccacacaaacccccagcagaaaacgtcatgattgtgtctgcagcagtgatggagacagcaaaagatgccttttccatttcagttcccagccaatggtaccacctgtcctttgggacaagacaatactcctaattttcaaagatcagcattgcacctgtgtctctgctaggagaaatacagccattttctggttataagtggggaggggggctctccatcagggaagaatgtgcattccagtttcctttgtcccaaaatgtgctctggtggactacaatcccccttccctagtgaaggcctgtatcaaaggctaggtctctaaggatcttgcagctccccaaggtcctgctggttctctgtggttgccgtaggcagaagaggttctgggaaatgtttgtgtgggatatagtcatgcagagagacacaagggctaaaattatctggaccgaatagaggccccaaacagatgtacagtctgtatggtgctcaccacctcagctcgggtttgagggggagagcaagcaaacctatgtgaactcaccacccagtgctctgccctccagatgttccccaatcactgccaacagtggtgcctgcgtttgcaagggcagaggggctctcagacaaattggtggcaatgagttgggtacaagagtgaggataaaaagacacactcccatctacactttccatgggactccaagttcctcatgggtcagtctctgccagacatttatgccctttttttttcctgtacccccaacttcttcctgtgggttctccaaaggtttccgacacttttccctcagcagtccacttgggccatgattattcacctgtaaggttaaatcttctttctaaggagaactggtatctgatgtctctagtaagccatcttgaaaaaaatcacgattttcattctttattctgttaatgtgatttatcacaattatttttatttagctttattgaggcaaagaaataagacaaataaaattgcgtatatttaaaatgtacaacatgatgatttgaagtaaatatatattgtgaactgactgctgcagtcaagttaattatcatattcactacttcaaggacttaatttttttctttcattttgatgagaatgcttaaggtctactcttagaaaatttcaaagtatataatttagtattattaactgtagtcaccatgctttacattatattctcagaacttacttatcttagaatggtaagtttgtatactttggcctacatctcccaatttgacccgcccctagaccttatcaactaccattctactttatttctaagaactcaattttattgttttatattccacagtcacttcttttgctttaaaatgaattatgtaaattacagcacagagaaaagaggcagaaagaaggctaaagggttttacactacttaatcttgggattggggtaaaaattatgacctgtgggtcaaatgcagtcctttacctgtttatgtaaataaagctttatcggaacacagctatactcattcatttacataatatctgtatctgttttcacacttcaacagcagaactgagtaagaagaaagactgtatagctcatataacctaaaatatttattatctgccctttgcagaaaagctttctgactagttgtaaattaaaaagagcatcttcatcataatctgaatgagctgaagtaacacaaaatcatcttcaccaatgttcttgagccagagtaagtggattgatatatttccatatcatatgtggtttgtattagtcaatattgtgttgctataaaggaatacttcggactgggtaatttattttatttttattgatttattgtttttccaagacagggtctcactatcaccactggtatacagtggcacaattttggctcacgtaactgccaccttccaggttcaagcgattctcccacctcagtctcccatttgctggaactacaggagcacgccaccatgtctggttaatttttgtatttttagtagaggcgggatttcacaatattggccaggctcaaactcctgacctcaagtgatctgcctgcctaggcctcccaaagtgctgggattacaggcatgagccaccaggctcagcccctatttttaaaataggttaatttacctcacagttctgcaggctatacaagcatagtgccactatctgctttaggccaggacctcaggaagctcccactcatggcagatggcaaaagggaacaggtttgtcacacggtaagagagggagccagagagatgccatgctcctttaagccaccagctctcatgtgaactaacagagcagggacttgctcattaccatagggaaggcagcaccgagccattcatgagggatccataccatcactcaaacaccttccaccaggcctcacccctctgacactggggatcacatttcaacatgagatctggaggagagaaatatcccaaccatatcaggttactcaaacattctgcttagaatttgtgcggccaaaactagttaccaactgtgtttgttaaataaaaaatggtattaaaaatttttgtgtataactaaaaaattatacagataggtatagagaaagagaaagggaagagggagagggagagggagagagagagagagagagagagagagagagagagagagagaggagctatccaatttgagtgtaaggaaatctaaaaaaaaataagaacttaaaatcctattactagaaactgctttttgaaacctagaaatattttattatatttttctttatatttaacagcatgggactgttagtaggacccctaccaaagacaatttacaacttcaagttttacccaccaatgatgtgacaaaagctttttgaatttaaactaagcagcacttctattaaacattgattttaataatataattgaagtgatatagcaaactaaaaatgtttttatttctaaagtaaatattttagtcaaagttgcatcaaaaatcaagcacttctgtgacatttttcaagactttaaccacaattatagttagtactacatagtacacattatttaaaatgtattataaaccttttctctttatatgaaatataaaatttaaaatgctgtaacatgattcatattgaaaaacatgtaaaattgtatacactgctctcatacagaaagtgccactggaatcacataaaactttctaatgctttaaggtgccaggcacagtgcttggcacatattacatacttcataaatgtttgttcactcattctctcatttactcatgtactcaaagaaatacgggcttaaggagaaactgcattataatgagaactgaaagcacaatcttttatcaacaaacttggagttttgacaaagactttgacagagagtggagcagatgagaggatgataatcaagatttcaaactccttggttaaaatctactaagtaaagccctgggttcacaagatgacatcatagagaatcagagtcaatactccacaaaaagaatgcattctttcaatacccaggttggacttttatatataaccatctgcttgaagctgggaataagtcgtgttagaagtaaaacacacagtccaccggcaggtaagaaccacctgatgggggacttgtttttctgcgctgagacttcttttcaggtagggtctcattctcttggttttgacaacttaatacaagttgaattaaaaaaaaaaactggcttaacccaaaaagttttattttaaaataaagataaataaatgtagaaggtagaggggtgtttaacattcctatttttttcctgttatgcacgaaccaatccatctattctgcatatttgtgccaaagtcacaatgtgaggtgtcaactttttgaggagcatttctgggctatttgcggaaggtctgataaatgcagtattttaccagagtaataaggtctacaaaatgcaaaaagctgtaaaaaagagaagaaagtatgggtactaagcagaatataagataaaaattgatcttggaggaaatttacctattttctgtttgccccaagaataccgtgctggcagcaagatgcactttattttttcctaaatgggaaacgggttaaaaatctgtaacaaaaataaaacataacactggcaagtcacttgcagctggcctgaattgtctttggtattcagagaagggaaaaaaaaaaaaaaaatggagggccgggcgcagtgtctcatgcccgtaatcccagcattctgggaggccgaggtaggcggatcacaaagtcaggagttcacgaccagcctgaccaacatggtgaaacactgtgtatactaaaaatacaaatattagccaggcatggcggcacacacctgtaatcccaggtactcaggaggctgaagcaggagaactgcttgaacccgggaggcggaggttgcagtgagccgagattgcgccactgcactccagcctgggtgacagagcgaaactctgtctcaaaaaaaaaaaaaaaaaaagtactgttgtaggtccagtcttgtcattccacagaaggtagggagcgtagggagaggtgtagaaaaccctctcaaattcttcgcttatgaactgactctgcttgaatacttctctaccttctcttaactccagtcatctgagtaatacaaagagagccgttggagatacaggttgtatctcctcatctcttgagaatttcctgggaaaccaagaaggcctctttactctgcattcttataaacaaattaagagtttggagacttcattgccatctgcacagcttctctgggtctttgccaattaaactttcttgccttttttttttttagtgattcctaagtgggcttgtgctatttttagcaaggcttttttgagaaccaagtactttcccttttctcttctaaagttatggtcatctacctttatcatttaaacaatttaaaggtttaagtagtaaaaaaattacaatctcaaaatatgtcctaaaatttgactctcttaaagactttattgtaactggctctacatccttattttctatgtttactaaaaacttttgtagtggttgtcatttatgcatcattggctgggctgtgagaactgtttaataatttgtggtctgagatgatcaaccttggaaaatatttaattgtattcattcattaaatcttttcccaacttaaatctaaaagctaagttgaaaagaaatgttatcaaatacggaaataagccttcagaattccaagttggatttcttgtatgaacttttttgtctcattaaactttgtttaatgagacaaaatctttaaattcagagtaaatatcatactagttatactgtttccaattttattaatgtcaatggacgatgtctaaattaaacaataaaaagtcccttcagtttatgtgacagaaaatgcgtgagcattagatatttatcttacaccatagttactgataattttttttgccaaaatataaagaattagtaatttctttaaaaagaaataacaatgcaaaacctactgatggtaagagaaaatccctgagatacttacttcaacacttttatcactgaaaacgattttgaagctattctaattattttgatttctataaagatcaatagaaaaaattttaaaaacataaaatatttgtgaatggcacactcacctgataagataataaaggatatcatcccagatagaatatttaagaaagttgcactgtgttttgtttttgctttaatgagttgtaaaagtaatttagcttatcaagacaaattcagagctacataatagtatcgtgaattttgccaagtcacataaataaagttgtgagttggatgactctcctaacgttattatgagatttaagtggataaaacttgctcggtagatttattagttcagaaaaataatctcctaccagcaaaaccaagaatttcttttagaacaggtttcaaggcaacaaactgtggcatttttccgcactttttgtcatgctaccaccactgactgaaccacctgaattaagtctcaaactcaggcttataggtagtggttatgacaaatagcagttttaatgatttcatatgaagacaaagacttaaagagtattttttgtgagatcatgcccctagaagaaactaaacttaaccatgaaatttaaatgaaatagattttatttaaaccgattaaacaggatttgaaatggttgccagtctggtcatccaatagggaacttgaaaattcagacatggattggcacttctgtttgttttttgagtcttcttgtcactgatgcagttatactatattttttctttatcttagttcattacattactaaaatggagaaaaatgagacaatgtggaatatttgacagttgctccactgtaggaatatataataggttccaaaggccattcttaactcctgcaatgtgctctatattcttggctttctcttaggaagtctagcctccagacttcagagctctacaaaccatatatatgtgtgtgtgtgtgtgtgtgtgtgtgtgtgtgtgtgtgtgtgtgtgtgtgtgtgtataaatatatgtaactctctctaaatataaaactctctatataactctctatatacatagagttatatagagttttatatagttatatatatatatatatacatatatttaaaatatatatggtttgtagagtacttggtggtgtaaaagtaattgcgatctttgctgtaacacacatcattcttatatgaccactatcatgttgacttagaggtctaggttttcagactacattctatagtggtccacgtaaaacaaaacaggtgagactggtcctggtcctcggaactgcttttatccaacagcagaattacctgaaagtgtggtgttggctaaatgtaacacaggcagagggtgagcctctgtattaaacacctagtagtctaaaggtaaaaggtcaccactggagaacagcacatacaaatattttaagtgtttcagcaagaaagacaccctgctctacatcaccatgtgtaggagtagagaaatgtacatctttgactccagaaaatccaccactgactcagcaatacttttcaatggccagtgctgttccctgccccactgcctgtattttggattgtgagagaatcaccgtaggtaccaacggtttcaattacttctggacacaggatataatacttttcagcctgacagccacaacctccactgcaccatcaaacttgactgactcaggacctagctttaatgcagtctgtcatatgactcatgacatgtatatgcaatttccaccccagctctaaataatgacagacttatctgttctggaaccatcttctcctagtgcaaacattaccccagcaaagcaggccagatgccccatcttgttttccaagtgcccactgatccattctttactaaagattaagacatccatgggagttcttgtttttttgcagcctcaagagcatcaccacacatctttctccattcatggtctgttttatctgacatcaaacgtgctctcagtaagtagtcataaaaactgtctcccgatcaccaaatgatgtgtgataccgaccccagcaccctgttcttgggtttaatttggataaagaccgtttggacaatccattttctgaagcagtttccgcatgtacatgaccttgttgtagtaaaccaggtcttctgtcaagtagctgaggtggatgaactccatgtgcagtgtaccagattcagccagaatgctgctacatgcaggcccctagcttcagctgcaccctactccactctgcaaatgtaccattgtccagggaatcccagtacatgtgtgaaaggcaggaaggaatttcttagccagttgcacagctttaatcttgaatatctcctttcctgaaaggtgatatgctgcaagtaggccttcaataaactgaatgttgacgtcaaacacaaacatctctgaattcacactgacctcaaggttgtctttaaacaatctttgcacatctaggaattcagcatgaagtcccaagatataaagggtatccaaagcatctacaacggtagcacccatttgtgaattttcaaatgttagtggcacatcctttccttttaataggtctgagttcattatgcccccaactgtatgtcctataattatcctaggcatgtttcatgctttaatttttttcccttttcttttttatgttgtcttccaggtctccaccattcatgcctacaaagtttggaataaggactggtggcagtggcttgttctctgtcttcatttcttggaccctatttttctctatctgaatttctgcttggatttccttgcttgacttttcttttctttcctttttttgagatgtggtctcactctgtcaccctggctgagtgttgcagtgccatcagggctcactgcagcctccacctcccaggctcaagcaatcctcccaccttagaccccagaatagctgggattacaaaagggcactaccaggcctggctggttgttgattttttgtggagacaaggtctcatcatgttgcccaggctggtctcaaactcctagatgaaagccatcctcctgacttggcctcccaaagtgttgggattacaggtgtgagccacagcacccaggctgcttgactttctcaatttttcttttgtctcttccagggacttgtcatgattagctcgaactttatttctcagaggttcttcttcttcttctctgtgtgtatgttaattgggtgcatagatcaggaagacttcagggtttttagcccctttgccagctactacatgaggaattaacacatcgtctaaacccagatcaaagcgtttgtgttttgagaagcctagaagaaaaaagaatgcccccaaacacagggtgatgaaggcattaaaaataagtgtcttctcagaaagtctcaaggtagtgctgtgatgtggggagggcggccccaggttcagaggtgggatcccacgtctggagagggcagcagggctggggtagtcatcgtttatgctcttgaagcttacagcaaatgcacgatacattgaactgtcttcaaaatcttggcaaaaatgggaaaactcaattttgctccacttgaaggactgctgcgcttcttcacaggcacctctttgacgctcctccaattccattcagaaacgtgagtgaccccccccccacccccttaaacgatcacaagcttatgtcctgcgagatctcgtttgccctttgactttcagggccctatcgggttatcagaagactcttcattcctaggggtagatcagagaagtcacactgcaaaggagctgccccttggggaggtgctcaagggtggtcttctgccccaaaagggagtctggctaactctgagaattgcagaaggttcaccatctctggtccttccattccagaatctcttaaccttagtggtggaaaaaataagggtctccaccgaaatctcaaaacagggaggaaggtttccggcctcccggaggccaaggcagaggcgctgggggaaggagcaagaagggaccagccgcccgcgcttcccgacgctgccaggcaggctcccgggacgggcagagctccgaggctgcctccgggcagtcacgtccaacgtacctgagcccggccagccgctgtcgctgtcgccgccgcactcgcctgtccggacgcaccttcctcctcctccgcggcccccgagaagctgggcgcgcaggcaagggaggcgcggcggcccctgcggctggtcagttcaccaggtgcctgctcccgagcgagttgccaccgaccccgccgcgcccggccgagccccgcgctccgcagcgtgggaaggagccgagcagagacccttgctccgagagcccggggtcggcgcctgctcattcctcgcgcagccgtggggcagcgggtggccccgggcgcgcgcgagcagcctcttctctggcacgcagaggccggctccgtgtcctcggccagccgccgtgggggcctcctccgcgctgcctcgcgtggtgcccggctcggcctagatgcggctgctgagagatggcgcccacgcgcggggctgcggcccagcctctgcctccccagtactggtgggcgccgaacagctgcggggcgacacgcgctgggcgcacgcacgtaggagccggagggtggggcagatggggcgcttccggaaccctccccgactcgcgagtgggcggcgccggcggcggagcgtggggcgcgctccctggagtccacagttaagtgacacaatcctgggtttacctttctctgtcgggatcatttttcttagcatgacgacctccaggtcagacacaaggtcacaggtggcggtttctgccttcctctggctgaatatatttcattaaatatatattccgcattttctgtatccagtcatccctctgtggactgataggttgtttctgtgtcttggctagtttaaataatggcgtaataaacataaagtgcagattatctctttaagataccgatttcctttccttcagacacatactcagaagtgagttgtatttttaactttttgaggaacctctgtatgttagttcatatgtctgcaccagtttacattcccaccaacagtgtacaaggacttccctttctctacatgctctgcaacagttgttctctcttgtgaggtgttggtgactatttttagtaatagccattgtaacagaagtgagatggtatctcattgtggttttgatttgaatttccctgatagtgatgtcaagcatctttgtgtatttatacctgttactgattttttaattttcttgaaaaaaatgcctattcggaagatatacctgtttttatttgggtgttttttgtttgtttgtttgtttgctattaggttgagtaccatatatattttgaatactaacctctcattagattatggtttgtaaatatttctcctattctgtgggttaccttttcatcttgttgattgcgtcctttgctgtgcagaagctttttagtttgatatcataccatttgtctattttttatttttttgcccgtgctttgtggtatatacaaaaaatctttgccaagacaaatgtcaaggagcctttccctgttttcttctaggagttttacagtttcagatcctacacttaaacctttaatccatttcaaattgatttttgtatatggcgtaaaataaacagtctaatttctttttcttcctcctaccttccttttttttccttttatttcttcttctctttttttattcttgcatgtgaatatccagttttccaaacatcgtttattgaagagactatcctttttccattgtgtctcctaggcaactttgtctaaaataaattgaccttaaatgtgtgggtttatttatgggctctttattctgttcgattgattgctatgtcttttcttatgtcagtatcatgctggtttgataaatatagcttaataatataatctaaaaacaggaagagtgttgcttccaactttgttctctctcaagagtgctttggctgtttagagctttttgtgtttccacacatattttagaattatttttatttattcaaaaaaaggtcattggaattttgataggaattatattgaatttgtatgttgctgtaggtagtatggcaattttaacaatattaatcatgaatgtgatacatattttatttttgtcttcagtatgtttcatcaatattttatagtgttgagtgtctagatccttcaaacccttggttaaatatcttcctaagtgtttttttttaaatactatttaaattggatagttttcttgactgcttttcaggtaggtcattatgatgtaaagaagtgcaactgatttttgtgttgatgttgtacctaaaactactgaatttattcattagttctaacatttttttggggaatttgttttctatgtataggatcttgctatttgcagggataattttactgcttgtcctctgatatggatgtcttttgtttctttctttttttttttctcttgcctaattgctctcgttactacttccagtaccatgctgaaaagaagtggtgacagcgggcattcttgtcttgttcctgaccttagaggaaaagttttagttttccctgattattatgttaactgtgagtttctcatagatggcctctactatattgaggaaattttcttctatttctaatttgccaggagtgttagattttttcaaatgtttttttctgtgtctattgagataaccatgtggtttttatctttcattcttttaatgtgctgtatcatttgactgatttgtctatgctgaaatttttgctataggaaatggaaagctatcaaaagattttcataaaggatattttggataagtcccctcagaccactgctaggcaatgggttctcaaaaactaaatatggagaaaagaaagtttgagatgttgctgtaggaatgatgttggcttgtaggagagcctatgggttgggagagaaagggatggatttaaaaattattggaatggtaacctagcctcaaggagagggggattctccgtgctcctttcttttctcatgtctttgatttttgccaccttgaaagttaatgtgattggttagatttcaggacagaataaaggaattatttctagagattaatattttaaagtattccaattacaccggagtcaggttttcccctctcctcctcctcctctctctcttccttttttcctttttctctttgtttcattgtttttattccttttctctatgcattaacaccaccaaagaggcttggagagttagtcttgttctcaccctcacactctgtgtcttacaattttttccctatggcactgttggaggtgcagacatgaggtcgattatattcaagaatcatgcttggggaagggaggagaaacaagataaaggggctttgactcaggactccttcagtccactatcacaagaaaaaggagatttccaaagtattcagaccagatctctagtttattcaaacctgagtcaaagcctcatctaataataaagttacttttctctgtctctttttttttacctttttgtacctacagctcctttaaattaattttatagagaaataattggtttaaaaataattggtttgaaaaataattcagatatttttgtgtcctttgaaacaatattaccttaagaacacctaaacattctttgcagcattgaattaaataatgcatgccttattcataacatgttataaaacagccatttaaataagatttatatgcattaaattgtaaaagggcccagcagatattgtcatttgactaaaaattgtaaagttaaagaaatataaacattataaaagtccacaaaccttcacaccaaactttgaatggtcaataatattcacttaggggtgaatccatcactggaaacagtgatggattgtgacaaagatcattttatatttcactttatggaattcttttgtttaagttattttgagatattgaaaaaatatttcatatataaaattttatgaggaatattaatatgattattattaatacaatgtaatagtaatattaatatatttctaatgtacaaatatgagaaatatattaatatattaatatatttctaatatacaaatatacaaatatattaatatattaatatatttctcatataaatgttaatattcacttttatgtataagaaatattttatatagatttatataaaatttatatatttatatgcatataaacgcatatatttataaatagtataaatatataaatttccatttttattttagattcagtgggtacatgtgcaggtttgctacaagggtaaactgtatgatgctaagggtttgacttctattgatccgatcatccagacagtgaacgtagtacccaataggaattcagttcttgtcctcattcctccctccctccttttggattctacagggtgtgttgttcccatctttatgtccatctgtatctaagatttggctcccacttataaatgagaacatgcaatgtttgatttttttttctgtgtcaatttgcttaagatactagcctccagcttcatccatattgctgcaaatgacattatttcattttttacagctgtgtagtatttcctgatgaatatgtaccacatttgtttatttcaatgagttttagggtacaggtagtttttgattacataggtaagttctttagtggtaatttttgaaattttagtgcacatgtcacctgatcagtgtacactctatccaatatgtagtcttttatccatcacctccctgtcaacattccccaccaagtccccaaatttcattatatcactctatgcctttgcatcctcatagcttaactcccacttatatgtgagaatatatgatatttggtttttcattcctgagttacttcatttggaataatggcctccagctccaactaagttgctgcaaaagacattattttgtttctttttatgactgagtagtatttcatgctctctctctctatatatatatatatatacacacacacatatatgtatatgcacgtatatacatatatacatatatatacagtcatatacatatatgtatatgcacgtatatacatatataccgtcatatacatatatacttgcatatacatgtatgtgtgtatgtgtgtgtgtgtgtgtatatatatatatatacacataccacattttctttatctactcattgataagtgaacacttaggttggttctatatctttgcaattgtggatattgatctttcctgcacagactaaagaacacagctgcaaatgcaatgatgcacaaaggagccatgcatctgagtaagaacctgtctactgcccatggctctcaagtgccaaataatgcaaaatagcccaaacgacaacaccaaaaataactttactaattatcaccttctgtaaaccaaaatcaggaattcaacaacaaacattctgtatgcagccttatccctctgaaattttccaggagtgaagtaaactgactatactaaacttagaccacagttaaagtaatactggctctcctagatgagaaagaataagcacaagaactctggcagtttaaaaagaaaaaaaaactgtctttttacctcagacaagcccactaactccccagcaatgcttcttaaccaatcaattgtctgaagtgacagacatggaattcagaatctggataacaagagagctccttgagatcaaggaaaaagttgaaactcagttcaaggaagacaagcaattcagtaaattgataaagagctaaaagacaaaatagcccttttaaaagagacccaaactgaacttcttgaggtgaaaaattaactacaagaattttataatacagttggaagtattaacagtggaattgatcatgctgagaaaagaatctcagagcttgaagaccagttcttcaaattaactcagtcagacaaaaataaagaagaattgagaaaaatgaacaaagttttcaagaactataggattatgtaaagagaccaaatctatgactcactggcattcctgagagaggagagagaataagcaacttggaaaatgtgtttgaggttatagttcatgaacattttccctaatcttgctagagaggttgacatgcaaattcgagaaatatagagaagctccaccacatactataaaagatgaccatctccaaggcacatagtcattagattcatcaagttcaatgaaaaaaaaacaaaaacaaactcaaaaagccaaaaatgtaaaagcagctagagggaagcggcaggggcaattcccgatcaggctagcatcagaccaatcagaagaaaccttgtaaaccagaagagattgaggatctatttccagtatacttaaaaaaaaaaaaaaattccaaccaagaatttcatatcctgacaagctaagcttcataaatgacagagaaataagatcttcctcagacaagcaaatgttgagggaatatatttcaactagactagccttacaaggggttcttaacagaagtgttaaacatagattagaaagaacaatacctactaccacaaaagcacacttaagtgcacagctacaggcactataaaacaactacacaatcaagtctacaccacaaccagctaacaacaacatcacagcatcaaaatcatacacctcaagactaaatttgaatatacatgggctgaacaccccatttaaaagacatagagtggcagcctgaataaaaagatgagatctaaccatctgttgtcttcaaaagacccatttcacatgcaataacacctacaggctcaaagtaaaatggtagagtaagaactaccctgcaaacagaaaacaaaaaagagccagatttctattcttgtgtcagataaaatagactttaaatcaataaaaattgagaaggacagtgaatggcattacacaatgataacaataaatgtattcaacattggagcacccagattcacaaaacaacttcctcttggcctatgaacagacttagactaccacgcaataatagtggagacttcaacaccccattgacagtgttagccagatcatataagtaaaaaactaacaaagaatctctggaattaagattgacagttgacaaattggacttcatagacatccacagaacactccactcaacaaccacagaattattctcatctgcacacgcagtgtattctaagttctcccacatgctcagtcataaagcaagcttcaataaattttaaagaaattgaaattataccaagcataacctctaatcacagtgcaataagaatagaaatggaaaccaaaagatctctccaatctacacaaatacatggaaattaaacagcttacttcaagtagctcctgggtggacactgaaattaaggcagaaataaaattctttgaaattagtaaaaatgggacacaactttccaaaatctctgatatacagccaaagctgtgttaagaggaaagtacccttcaatgccttcaacaaaaagtcagaaagatttgaaattaataagctaactttgtacttaaaggaactaggaaagaagaacaaacaactccaaagctagcagaagaaaagaaataatgaaaatctgaaaacaccttgagaccagaaaatccatacaaaggctcaacaaaaccaaaagctggttgtttgaaaggataaatgagattgatagactataagctagattaagaaaaaaaagagaggggattcaaataaacacaatacaccatcagaaatgacacaggtaacattacaaccgatccaaaagagatgcagaacatcatcaaagactgtgatgaacccctttgtgttcataacacacaaactagaaaatctaaaagaaatggataatccctggaaatgcccaacttcccaagactaagtcaggaagaaatagaaatcccaaatatactaatatcaagttttgaaattaaatcagtaataaataacataccaaccaaaatagccctggatcaagtggattcacagctgaattctaccagatataggaagaagaactgacatcagtcctactgaaatgatttcaaaaaaaatcaaggaggatggactttttctgtgaagccagcatcagcctgataccaatatctggcagagacccaatgaaaaaagaaaacttcagaccaatatagattatgaacatagacacaaaaatcctcaatgaaatactaacaaatctaatccagcagaatagcaaaaagttaatacaccatgatcaagtaagctttattcctgaaatgtatggctggcttaacatatgcaaattgataaatgtgattaaccacataaaaaaataaaaagcaaaaaccatatggctatctcaatagatgcataaaaacttttgataaaatccaacatccctttatgataaaaccctcaacaaagtagtcattgaaagaacacacctcaaaataataagagccatttatgacaaacacacagccaacattttactgaatgagctcgaaccactcactttgagaactggaaaaagacaaagatgcccactttcaccactcctattcaacatagtactagaagttcttgccagggcagtcaggcaagagaaagaaacaaaagacacccaaataagaaaagaataagtcaaatcgtctatcttcactgatattatcattctgcacttagaaaatcctaaagactcttccaaaaggctcctagaactgataaataactttagtaaagtttcaggatacaaaaatcaatgtacaaagaatttgtatataccaaaaatgtccaggctgagagtcaaatcaagaacacaaccccacttagacaatagccagacacacacacacaaatgctcaggaatatagctagccaagtagatgaaagatcgctataaggagaaatacagaacactgctgaaagaaatcagagatgacaaaaataaatggaaaagcattccatgctcatggataaaaagaatcaatataaaactggccatattgcccaaggcaatttacagattcaaatgctgtttctatcaaactaccaatgtcattctttacagaattagaaaaagtactattctaaaattcagatagaaccaaaaaagagccccaagaaccaaagcaatcccaagcaaaaagaacaaagcatcacactactcaacttcaaactctactataaagccatcataaccaaagcagcttgatactgctacaaaaacagacgcatagaccaatgtaacagaatagaaaactcagaaataaaaacacacagctagaaaccatctaatattcaaaaaggccaacaaaagcaagcaatgaagaaagggccccctatccaataaatgatgctggataactgactagccatatgcaaaagattgatggtggactcctaccattcaccatgtacaaaaattaactcagaatggattaaagatttaaatgtaagacctcaagttttaaaagtcctggaaaaaaacctaggaaatactcttctttatttgaccttggcagaaaattgtttgactaagtccccaaaagcaattgcaacaaaaccaaaaatagacaagtgggacctaattaaactaaagagcttctgcacagcaaaagaaaatataaacagagcgaacagacagcctacacaatgggagaagatatcctcaaattatgcatctaacaaaggcctaatttccagaatttatagggaacttaaatcaacaagcaaaaattaattccattaaaaagtgggcaaaggacatgagcctatacttttgaaaagacacgagtgtccaaaaaacatgaaaacatgctcggcgttactaataatcagagaaatgaaaatccaaaccacaattagataccgtctcataccagtcaaaatggctatttataaaatgtcaaaaaacaacatatactggcaaggctttagagaaaaggaaatgcttatacactgttgctgtgaatgtaaattaatccagctactctggaaagcagtctggagatttctcaagtaacttataacatagctaccatttgacctggaaatctcatgattgggtttatattcaaaagaaaataaattattccaccaaaaaggcacatgtacttgtatgtccatcgctatgctatttgcaattgcgaagacatggagtcaactcaggtgcccattaattttaagttggataaggaaaatatgatacatattctctatggaatactatgtagacataaaaactgagatcatatcctttaaagcaacatagatggagctggagatcataatcttaaacaaattaacacagaaacagaaaaccaaatactacatgttgtcacttataagtgggagctaaccctatagcacacacagacatcaatatggggacaattgacactgtggactactagagggtggaggaagtgggggtgggttaaaaaactacctattgggtactatgctcactacctgggtgatgagatccacactccaaaccacagcattactcaatattcccacgtaacacacttgcacatttgccctttgtatctaaaagtttaaatgtaaaaaagacaaatataagcatgctttcttttttatttttaaagatttagtgggtagaagtgcagatttcttacatgcatatattggatagtgatggagtctgggctttagtgtacccatcacctgaatactggacattgtatctgttaggtaacttctcagcttttgcccacctctcatcttcctgccttccgtagtctccagtgtctgttattccactctatgtgtctatgtgtgcccttcacttagcttccacttataagtaagaacatgcatattttattttctgtttctgagttattttacttgggatatatagcctccagtgccattcatgttgctgcagaagacatgaattcattcttatttatgactgagtactattgtatggtgtgcgtgtgtgtgaatatatgtgtgtgtgtgtatgtatatacatatatgtgcgctgtgaccatacatacacatacatatatgtatatatacatgcatatatgtatacattcacacatatatacctatgtacatatacacacctatatacatgtgtgtacatacacatatacatgtatataggtgtgtgtatatacatacacacacacccaatctgattatttttcagcagtgttttgtatttctccttgtagagatctttcatctactaggctagctgtattcctgggcatttttctggaagtgtatatatatgtatatatgtatatgtatgtatatacatatatatgtgtatatgtatatgtatgtatatacatatatatgtgtatatgtatatgtatgtatatacatatatatgtgtatatgtatatgtatgtatatacatatatatgtgtatatgtatatgtatgtatatacatatatatgtgtatatgtatatgtatgtatatacatatatatgtgtatatgtatatgtatgtatatacatatatatgtgtatatgtatatgtatgtatatacatatatatgtgtatatgtatatgtatgtatatacatatatatgtgtatatgtatatgtatgtatatacatatatatgtgtatatgtatatgtatgtatatacatatatatgtgtatatgtatatgtatgtatatacatatatatgtgtatatgtatatgtatgtatatacatatatatgtgtatatgtatatgtatgtatatacatatatatgtgtatatgtatatgtatgtatatacatatatatgtgtatatgtatatgtatgtatatacatatatagtgtatatgtatatgtatgtatatacatatatagtgtatatgtatgtatatacatatatagtgtatatgtatgtatatacatatatagtgtatatgtatgtatatacatatatagtgtatatgtatatgtatgtatatacatatatagtgtatatgtatatgtatgtatatacatatgtatgtgtatatgtatatgtatgtacatatgtatgtgtatatgtatatgtatgtatatacatatatgtacacattcacacatatatacatacatatatttacactcacaccaatatacatgtatgtgtgtatatacacatatgcatatatgtatatatacacatatgtatataggtgtgtgtgtgtatatatacatatatacatgtatacccactctgataatttttcagcagttttgcatttctccttgtagagatctttcgtctactaggctagctgtagtcctgggcatacacatgtaaacacacacaacatgtacacattttctttattcaatcatcttttgatcaacacttagattaatttcacatctttgctattgagaatagtgctgtgataaatgtacaagtgtaggtatcttttagatataatgatttatcttttaatctgattgtagttttatttttagtttatttagtttattgagaaatctccatactgttttcagcaaagtttgtactaatttataatccagtgagtgatgtataaggattcccttttctccacattgtcattagcatctattggctttttaataatagctattttaactggtgtagatggtatctcatagtgattttaatttgcatttttcagatgattagtgatgttaagtattttttcatatgtctgttggccacttgtatgttttcttttgaaaaatagctgtttctttctaccggaggtacaaggaggaactggtaccattccttctgaaactattccaatcaatagaaaaagagggaatcctgcctaactcattttatgaggccagcatcatcctgataccaaagccgggcacagacacaaccaaaaaagagaattttagaccaatatccttgatgaacattgatgcaaaaatcctcaataaaatactggcaaaccgaatccagcagcacatcaaaaagcttatccaccatgatcaagtgggcttcatccctgggatgcaaggctggttcaatatacgcaaatcaataaatgtaatccagcatataaacagagccaaagacaaaaaccacatgattagctcaatagatgcagaaaaggcctttgacaaaattcaacaacgcttcatgctaaaaactctcaataaattaggtatcgatgggacatatctcaaaataataagagctatctatgacaaacccacagccaatatcatactgaatgggcaaaaactggaagcattccctttgaaaactggcacaagacagggatgccctctctcaccactcctattcaacacagtgttggaagttctggccagggcaattaggcaggagaaggaaataaagggtattcaattaggaaaagaggaagtcaaattgtccctgtttgcagacgacatgattgtatatctagaaaaccccattgtctcagcccaaaatctccttaagctgataagcaactccagcaaagtctcaggatacaaaatcaatgtacaaaaatcacaagcattcttatacaccaataacagacaaacagagagccaaatcatgagtgaactcccattcacaattgcttcaaagagaataaaatacttagcaatccaacttaaaagggacgtgaaggacctcttcaaggagaactacaaaccactgctcaatgaaataaaagaggatacaaacaaatggaagaacattccatgctcatgggtaggaagaatcaatatcgtgaaaatggccatactgcccaaggtaatttatagattcaatgccatccccatcaagctaccaatgcctttcttcacagaattggaaaaaactactttaaagttcatatggaaccaaaaaagagcccgcatcgccaagtcaatcctaagccaaaagaacaaagctggaggcatcacgctgcctgacttcaaactatactacaagggtacagtaaccaaaacagcatggtactggtaccaaaacagagatatagatcaatggaacagaacagagccctcagaaataacgccgcatatctacaactatctgatctttgacaaacctgagaaaaacaagcaatggggaaaggattccctatttaataaatggtgctgggaaaactggctagccatatgtagaaagctgaaactggatcccttccttacaccttatacaaaaattaattcaagatggattaaagacttaaacgttagacctaaaaccataaaaaccccagaagaaaacctaggcattaccattcaggacataggcatgggcaaggacttcatgtctaaaacaccaaaagcaatggcaacaaaagccaaaattgacaaatgggatctaattaaactaaagagcttctgcccagcaaaagaatctaccatcagagtgaacaggcaacatacacaatgggagaaaattttcacaacctactcatctgacaaagggctaatatccagaatctacaatgaattcaaacaaatttacaagaaaaaaacaaacaaccccatcaaaaagtgggcgaaggacatgaacagacacttctcaaaagaagacatttatgcagccaaaaaacacatgaaaaaatgctcatcatcactggccatcagagaaatgcgaatcaaaaccacaatgagataccatctcacaccagttagaatggcaatcattaaaaagtcaggaaacaacaggtgctggagaggatgtggagaaataggaacacttttacactgttggtgggactgtaaactagttcaaccattgtggaagacagtgtggtgattcctccaggatctagaactagaaataccatttgacccagccatcccattactgggtatgtacccaaaggattatatatcatgctgctataaagacacatgcacacgtgtgtttattgcggcactattcacaatagcaaaggcttggaaccaacccaaatgtccatcaatgatagactggattaagaaaatgtggcacatatacaccatggaatactgtgcagccataaaaaaaggatgagttcatgtcctttgtagggacatggatgaagctggaaaccatcattctgagcaaactatcgcaaggacagaaatccaagcacctcatgttctcactcataggtggcagttgaacaatgagaacacttggacacagggtggggaacatcacacactggggcctgtcatggggtggggggaggagggagggatagcattaggagatatacccaatgtaaatgacgagttaatgggtgcagcacaccaacatggcacatgtatacatatgtaacaaacctgcatgttgtgcacaggcacactagaacttaaagtataataataataataattaaaaaagtggtaaaaaactaaaaactaaaaaataaataaataaaataagttattagaagaaaaaagcaaaaaaaaaaaaaaacagccctagctgatggtaattttctttatagtatttctgttttcaatttcatttatttctattaaaatatttattatgttttaatttttttcttcatatttaatttaatattccctttctagtttattaaggtgggagcttagattattggttgtatatcttatttttaatgtatgcaatcaatgctataaattttcctctaagcactgctttgctgcatcccacacatttgataagttgtgctttttgtttcattagaaatatttttaaatttttcttgagatttcttctttgacctattagttataagggtgttgtttattatctaagtatttcgaagtcttcttgctatctttttgttattaatttctactgtaattccattgttgtctgcaagtatacattgtatgattttcatttttttatatttgttaatgtgtgttttatggctcagaatgttgtctatattggtaactcttccacgtgagcttgatcagaatgtgttggataaagtagtctatgaatgttcatgatgtttagtggatagatgatgctgtttcactatgcacttgatggttttcttttttctatatctgtctatatctgatgtgagtgttaaagacttcaactaaaaaaatggattaatctagtctccttgaaacactgagtttttacctcttgcattttgatactctgttctttaggtgcacacacatgaagaatcctcatgtctattcagagaattgacccctttatcattgtgtaattgtccttatctttggtaatttccttgcactgaagtctgctctgtctgaaattaataccactactcccaccttttttttttttttgagacggagtttcgctgttgttacctgggttgaaatgcagtggcgtgatcttggttcattgcaacctctgcctttggtttcaagcgattctcctgtctcagcctcccgagtagctgggattacaggcgcctgccaccacacccggctaatttttcatttttttagtagagacggggtttcaccatgttggccaggatggtctcgctctcttgacctcgtgatctgtccgccttggcctcccaaagtgctgggattacaggcatgagctaccatgcctggccattaaatttagaattaagaccagaaatcaggacaaatgtccactaattaaagctcagatggagcattcagataaggcattatgacaagttagggcacagatgataagagattttgatctaattattctcagaatcttctgtcacagatataaaataattataacctacggaagacatgaagacacattcctgcccccacatccaataagtagggtcataactatttcattacccttcccctctgtttccacccataactccaattcccagaaataaagtagaaaataagaaaaaaacaggtttgggggatttggaaacaggaaggttagaaccatggatgtaaagaaggacgctggagagactgaactggaaaataccgtggaaataatgcagtctaggcttagagtgtgttttctctttctagcaataaaaaccacacttctggtggctcacgcctgtaatcccagccctctgggaggccagggagggtggatcacctaagatcaggagttcgagaggagcctggccagtatagtgaaaccccatttctactaaaaatacagaaattagccaggtgtggtggcacacaacctgtagtcccagctactcgggaggctgaggcaggagaattgcttgaacccgggaggcagaggttgcagtaagccgagatcatgccacagcactccatcctaggtgacagagcaagattctgtcttaaataaataaataaataacataaccaataaccacaattttagtgaagatcatgcccattattataaattttcctttaaagcaagaaaatgtatacctattagaggatttaaattgctagaaaaatacctagagattacacacattaacccagttattcttgtcataaaacacttaaaaagtgatcacatttgtttatcactccagagtaagttttggaaaatacttgagagcagaggcaatgcccaaatctccctggccaaggtaaaagctcttctaggcaattttttattcgagtaggaaataaaaactgtgttgctagtttatttagaaagtgacaaaaatgtaagcactatgcatataattctatgtattatagggaattagttacatagctaggacttttctcaagggaaaactcttggcatatttttaacatttaataattatatgaatatagatgaaatattttaaaatattaacaaatagaacatcagtatattaaaagagtggcatgttattctccaaatcagaaccattttataatagtaatacaataaatactacttattatgctaaatttttttcttacatatgctggacacttgtatatgtacctcacttgtattaatccatttaaaatttaaaagattggccagacacagtggcttacacctgtaatcccagaactttgggaagcggaggcaagaggatcacttgaggccaggagtttgagaccagccgtttgagaccagcctgggcactatagcaagatcctgtctctcaaaattttttttttttaaaagaaaaaaattttaatgtaaaagattcctaagtggagttgatgttatctctaatgaacaatgaaatgaacagagatataagagatacagataattttaataacttgtccacaggtgcacagtccaggaacatcagtaatctaataaacattatataaagtcaatagctgcccaaaaagctcttaacaaaactttggcaactattctcagtgcactttatgagatcactgttagaggggcacttttatagaaaacactgtaagctcatacccaacactccgtgtgttttctataccttccacttccccttagtccaggcaatgcgattaagtagaagtaatttttaaaaatcccttccagatttggcccttaaaataatctacacataggattctctaacttctctaacttcttcactgcctgataacctttgagaagttgtgttccaggtgatgtagctacatgatggtgaggagctgcgggactgaccttggactgtttttgagtgggtttattgtgttaaaccactgaaattacagaagcttttcttttttttctttttttttttttgagacggagtctcgctctgttgcccaggctggagtgcagtggtgcgatctcggctcactgcaacctctgcctcccagattcaagcaattctctgcctcagcctcccgagcagctgggattacaggcacccgccatcacgcccaactaacttttgtatttttagtagaggcagggtttcaccatcttggccaggctggtcttgaattcctgaccttgtgatccaccctcctcggcctcccaaagtgctgggattacaggcgtgagccaccgcgtccagcctcaaaagcctttttatttcagcagttagaggtaatttcttggacaaatacagtgaaaaactacatcaataaaacaaatataagaaaaaattatgactatctcaaactaatattcagtagcattattaatgagaatcacaagatatattacttgaccggcagtaacaaaacagaaatgccagctatttttcagaatacaaagtaaaataaacagaaacatctctaaagatttcttttgcaatagtaataactattcaggaaatataaaggaagaagaatcccaatgtattaacagtaacatgcatatagaatatttagaaataagctaacaaaaatgttcatgttgaagatggaaaataatatgacaagatgttactatgctgaatataggtgaaagtgggaagaaagaggtgtactatattagtcagggtcccagaggaaaacaggtgtctacgctaatcggataattaagaatttaatgaaaagactaattaaagtatgggaaagtaaggggcacaaacacaagtgtaagaaacagtgatgcactctgggacttgcaacaccaggaagctgttaccagctctaggcctgaggagcatgggaaaaacaaacaaacaaaaaacaaaaaaaaaaacaatttacaaaacaaggggggcactgagaaaagtggctaacaaaacaacctgttatctcaggggttcaagaccaccctggccaacatggcgaaaccccatctctactaaaaatacaaaaattagccgggtgcagtggcttgcacctgtaatcccagctactccggaagctgagtcaggagaattgcttgaacccaggagacggtggttgcagtgaaccaagattgcgccattgcacttcagcctgggcaacagagcaagactacatctcaaaaaaaaaaaaaggccattatcaggaaagctgggatataaatctcacttccctcccacctcccagtccttgtcagacctgtacatgggctgcacctaattgagagttggagggcaagggaactcgtgagtatattaataaaaactagcttcctggacatatagcagaatgcaaaagggtaaaaaataaatctgggtgggtaaatgtgatggaatactatactgtttccctaaattggaagttgaatgaaaaaaatgtcagtagtcccaccatcatttatagatttaatatgattccttttataatactaataagaattggggacacattatgaaataatccttaagttcatctggaaaaataaagaggttaaaaatgataataataaaacaaaagactggcaataatgggggaattatttttacatatacatacatataataataaaagtcatttgtacaagtttatacacatacatgtaaattaataggatcaaatgaatgacttcatctccaacacaatcatttgcatgcatggataactacatttgtgtgtatgaaacaagagctaacctagagacacctgggaaggctagacacttgtcagattgtttttcagacctacatacttagtctgtttctgttgctctaacagaatgttacacactgagtagtatttaaatatatatatatatatatatatttaatatatattaatataaatatatatatttgtagttctagaagctgggaagtccaaggtcgaaggtccacatctggtgagggccttcttacagcatcataacatagtggaaggcatcacattttcagagggcaagagcaggcaggctagttcagctctctctctctcccttttttttttttttttttttttttttgagatggagtctctctgtctcccaggctggactgcagtggcacaatctttgctcacttcaacctccacatcccaggctcaagtgattctcctacctcagcctcctgagtacttgggattacaggtgtgtgccaccacatccagctaagttttgtatttttagtagagatggggttttgccacattggccaggctgatctcaaactcctgacctcaggtgatctgcccaccttggcctcccacagtgctcagattacaggcatgtgtcaccatgcccagtccctctctcctcttcttataaagccactatgccatcatgagggcccccacacacatgaccttaattctaattacctccaaaagcccccacctccaaataccattaacatacgcatttggggattaagtttccagcacatgaactttgggaggacacattcaaaccatagcattctgcctctggccccaaaatccatgtctttctcacatgcagaatacattcatttcataccaatagccccaaagtcttaactcattccagcaccaactcaaaagtccaaagtctcacctaaatcatgaatgagtgagactgaaagcacaatttattctgagatgaatttccttcagctgcgagcctgggaagtcaaacaaattatgctcaaaatacattagtgggacaggcatgggatagaaatttccattccaaaagggagtaataagaagaaatgagtaacaggctccaagtaagtccaaaacccaacagggtgaacaacattaaatctcataccacttcctggttggagtggggatgggcccccactgcctcaggcagccctgcccctgggactttgctgggttcagcccatgcttccgctttcccagggtggatttacatgctggtagctctatacttcttaggtcctggtggtggtcccactccaatggctccatttggcatttccctggtaggaactcagcatggcagctctgcccctgcagcaggtttctgcctgggcctgaatgctttctatgacaggttttggaatctagatggaggaaactgtgcctccgtagctcttgcattctgcactcctgcagtattagctccacatggacactgctaaggcttatggcttaggccttctgcaatggtggtctgaactgcaactggggctgcctgagccacagctggggctaaaaagtgctgcaccagaatgcagtgagcagagctctgaggtggcacagggcagtgagacatggagggatcccctggccagacccgcaaaaccattttgccctcctagagctctgggcctgtgaggggccatatcgatgatctcagaaatgccttcaggactgtttcccctttttctcaatgattagcacctggtcccttctattcctgctcatctctagtgaccagtcactcagccacacccttgctgtgttctccctaacttgtttttctgttcttcacattgccaaactgtgaattttccaaatttttatacttggcttccattttaattattattctgcttgaaatcatctctttgctcccatatctcactgtaagcattcaagaacagccatgcagtatccagaacactttgtggcttagatttttttttttttttggcccagctcaccactcttaggttccaccttccataatgtcctaggacatggacataatgcagccaagttctttcctgctttataacaaggatgacctttatttctatctgagaccttgttagaatggcctttcctgtacacatttctactagcattctggtcatgactacttaagtgctctctaataagttcctgactttccctcattttcttgtctcttatgaatcttcacaagaattacccctaatcctctgcttctgccactatgcaacacgcttttctgagcctgttgcttcacattcttccattttctacccattacccaataccaaactacctccaaatattcaggaatttttatagtgacaatcccacatctcagtaccaattttctgtctcagtccattttctgttgctataactgaatagcacagattgggtagtttatttttaaaaatagatgtttatttagctcatagtcttgttgtcaccaagttcaaaagcatggcaccagcacctggcaagggcctctgtgctgcaccatactatagcatgaggtgttctcatggtaggcaggcatgggtgcatctgctcatgactttattcctcttcttataaagccaccagtctcatcatggggtctcagcctaatgaccttatgttatcctaattgctgcccaaaggccccatttagtcccacctcttaatagtatcacaaagacaactgaattccaacatgagttttggagaaggcactcaaaccatagcagtactcatacactcataccctttcatcatatgtaagaatattgcaattatttcatctttaaatctgattgtggggaagatctatttctgacacatggaaaatccatgtcccagtctctaagataagaaccaagtcccagggattttcttttaagtcagcgtctctgctcatattataatttcattcagtggatatgtattcctaaatctactttcaatttaactgatattcccccaagatggattcagataaaaagctgggccttatgggacaggattccttcatgaattcagcactaattttctcctcctgtcacatcttctgcagatatacggagagagctttaatatagcatcctccatgctgccatctggggaaattcttaatcaacacaccctcccagacaaatgggccatcaagtgtttcacagatggatgggacagtcaggccgccccgaattagtgggcttggcttatctggtttttttctctattatttctgttcccctttttgcagtctctttgctgtaattgaattatgcttataactcacgtcttttatgagcatagctcaaacacaccttactggggacaaagctgctagtactcagcatgaataggtgttttgaagccaaagaagcacgcatttctgtccttaaaaattcttacagtgctattctgatggggagacagtctgaaatatatataggtaggccagatttcaagagaggagatagagtaatttggaaacttaagcattttggtgcctctctaaaagggacaaggatgccattctacacaactctggagagcatggcgacatttcattctttgcccctagcaaacttagaacatggcgccctggagaggctcacattcacttagaaaaaaatacaatagtgagcatacttttaaactgctctttttataagactcaacatatactcagaaaaattccagttgggatctgtggaagagaaaaagtttctgcaaaattggagaaaatgtgtagcacagtattgtcactatgtgtgtgcaagtgaaatgtaagtgctttagtaaagttcttaagctcaccctcctctatgtctaccttcaggactcagccatctctgagcataaacacatgaaaatatatgctaactcgtatgaaattcaatatgaatatttgagagctttctggggctgggtgtggtggctcatgcctgtaatcccattactttgagaggcagagacagaagaatggcttgaggccaggtattccagaccagcctgggcaacatagcaaggtcttgtctctactaaaaataaaattaaaaataaaattacctataattggtggcttgtgcctcaagtcccagctgcttgggaggctaatgtgagagaatcacctgagcaaaggagctcaaggctgtattaagctatgattgtgccactgtattccagcctgggtgttttcaaaaaataaaaatagaaaagagttttctgggaaggaagagatcctaaatgaagccatcagaaacaactagtttgactcagctgcaaagggtttgctaacgcaagtgagaaataattctgaatacagaatgaagtccaactcctgggaaattctttggattctagcaagaggacaagagacacaagtaaacagaggtcaatgccatgaggatcatgtgagatacaggcacgcaagcaggattaagatggggctagagaggaccgcaaagaagatgaatccatccatttcttcacacaccacccccaagactgggctgcatcagggacccagcctcctagtgatgcagttgggaagagaccacagtgcctactgaaactgcagtaaccgttagtgagagaaggaagaagcaggcaagagaatgttggtgtattcaaaatagacaacctgtcaaaactccaaggactatgacgggaacttttcaaggagctgggccatgtgagcatgtggctacctgagctaggaagtccatgctattactgtcattgtgacccagtctgtaccaactagctggtctgaccatgcaagcacaggggatatactacacaaagcattcctctttttattgagcctcaaaagaaactggaaactggtgtctagatctcaatggtgtggagatgagagccagatgagtccatgtctcccatcccttagccagcactgtccatcttggaatgttaagctgcaagggcaaatgatatcttactgtggtcttctgacccagtattccacaccacatttaaatattgtcagtgccactattgatttaggcatgcaaaaatgagatccttcaattacagagaacaaacgtgctgtatataatgcatttcagagatatttattgcaattctcatagcaggatcctgatggagaacaaagaaattaaagctcagagctacttgagcactcttctcttaagaaacaggggatctcctacttcctgatgtcacttgttctctcttcagcttcttgaccactgcatagcctaatctggttgcctgacacttgttagattcagagcttcctgctagccactgtgcaaaaagagaggaacaatccacaccaagacaagaaaaccttgcttaggaggagaatggaatgattgcaaacactatgagaataaagactacacctgttatatttgttgaagtattcccaccatatggtccagtgctgaaacatggcaggcactcaatgagtttttagtttttcactcaaaattaaattaaaataatgagatgacctttatatcagaggtgaaaggcttagtgagtggaaaggagggagaaactaactgtctaggttgtgtgcattgatggagagtggaagacactggcaactgagttgcagacctgggctggagcaagttgtcctgactcctaaccagttgtccattcccatgcactgcaccaccctgactatgaacttgggtatggagggcatgggtagtggtggctcccctcaggtatctccaggccctctgccctctgtgctggcagtcctgactgtgaactcaggcatggagggtgtgggtaatggtggctcccctctgggtatctcaaggctctctgccctccatgctggcagtatttgccagtgcaggtgagggcatggtgaatgaagcccctcatatcagagtttgacttcagatggtagattttgtgtgagtgatgcagcaggcacacattttactcattttaattttttcaagctttactgaggcataattcataaatataaattatatatatttaatgtgtacagagggatgttttgatatatgtatatactgtgaaatgattactgccatcaagctaattaacataaccatcaccacatagttaccgtgtgtgtgtgtgtgtatgtgtgtgtgtgtgtgtgtgtggtgagatcacaagatctaccctcttagcaaatttccaggatgcaatacactattatacattatagtcaccaagctagctatacataagacctccagaatgtattcatctcatagctgaaagtatgtacccttccacccaaatcccccaatttccctcacccccagtccctgtcaacctattttctactctgttcctatgagttggacttctttagattttacatataaatgagatcatgcagtatttgtctttctggggaagaggttttaaaaccaacaacctgttccagtgactcccctcctttgagtgtgatggtgacaccttgcgtcagtgacagtcctcacagggaggctgaggctgggccagctggaaagtgatggtcagtgaggcactgcgtgggactccctgaaactgatacaacagtttcatacagtttcagcagtacatgcacacctggagttgccaccagattctcttcctgaactgtgggctccttgtgggggtggatggtgaagtctcctggtcattaagcccctgcagccccagggcaagctcccctctgggtgaggatggagactcaagactcagtagggcagaaatacatctccattcctgggttcctgcagctagctttccctcctggaaatgagtttgggcttcaccagttcactctttggccagccaggttcccttgatatctaacacattctcatcacaatgactgaggtgacagtgggacttaatgttttcatcttccgtgcccttgtgactgacagtcataaaaatgttcattcaaagaaactagccatgtcctgtgcctgaccaaccatgaggccttccaagccccacccaggcatcactgactccttccagcttcctttgctccccaggctgagttcagcctctgcctgtcctgtattgcagagcaccttgtcatccctccttcatgtagcctaggtctacctgttgggggctagaattttctggtccttattatctttcttcttggtcttaatcctatgaccaaggtgaaaaaagcagtaggagaagttgaaaattgagtacattgaagccttgaccagctggtaaacagattctatcttccttgatgcagaatcaataacctacaactttagctgaatttctcaggacagccttctctgggacccatctctgtcccctaaaaatttcagaatgttctatcttctagcccaactgaacctgtgtgtgtgctttgcagctgtgagggccattgccatgagcacctacctgtgaagtaggcgtaatgctgttccttccatcctcatggccccagaatgttttcccattgggctgagttgagcccagttgagtggaaccacttcttctattcaagcatcttggaatagaggtctgaggaatccagactctccttacttggctctgggctgcctcctcagagctattagccaaattaatggcacatctataactggcacagcagcttgtgtctgggttctggtatatttatctggtaaatgttctgtaaaatcatattatgaaattaaaacaagatcttaataaatcacagtgtatgagatttaccaacaggattaagaagacatttctggaggcaggaattgtgcttgtttcccaaaggtatgccttgcttggtactgctaaatgctgcactggggtccctggagtggccgagagccctgtggctctatagctcagcaagggtgtcctggagttgatccaagttgtgaaatgttccttacatctccttgattgtcaagctctcactcctctccacagctcagcaagggtgtcctggggttgatccaagttgtgaaatgttccttacatccccttggttgtcaggctgtcactcctctctgaaatacatccagctcttgaccacttctccacctggtgctcatgctttagttcaggtcctcaaaatggatgattccagcagcctctttactcatcacctatcacaacatcacacgggctctgatttatcacacactcagccctgtcatgatgtgcttccccaaagtgcaccccagcacccccaagccagacaccttccaatcagcctcctacccccacactcacctccatatttctctctgttgctagagtacgtgaggcacatcagaggtcgcccttgtccttaggctgtggattggatttaactaactgggagtttgagagatgcaaggagaccagaatgagaaaggaggatgaattcagtatttattttgccactgcttttctgtgaggccatctcagcctggttgtttccctccaacaaaggtcaaagctcctcttaaagaggcctgctctccatgattctgtccttctgatgctagaaataactttctccccaaatccctttgggcctgatacggtcactagaaccatgttactgccctacttatgggcttgctgaacactccttgttaaaaagtgataaaagaaaaacttcagctaaattaaatttaaaagagtttaattgagcaatgaacaactcatgaatcaggcagcctcctgagccagagtaggctctgacactccagagcaaccacatggtggaagattaatgggcagcaaaggaaagtgatgtagagaaaatagaagtgaggtacagagacatttgggttggttacaggtgtttgctttatttgaacacagtttgaacactcagcagtgtatgagtggttgaagtatggctgcttggattggctgagactcagctattgttacaggtacatactcctaaattaggttttcaatctcatctacctactaagttaggttgtggttagtccacagggactcaaatacagaagtagggagtccttctcaggccacatttagttcgctttcactataatagtccgtttattgaattgtccctttcttattctaattagagttgaccatccttttcctgaccagccttcaactagcacacttatctttctaaaaccattcagggtttcacattaaactcacaaacatttttctcaaagagcagagccagtccagggagactccccaggaagggagcctcactcttttggttcctgcaaattttctgccatagctctttgttggttgaacccaactagatgttggaaaacaggggtttgtgaatgtcatagacacaacatccttcctcctggagcaggggcagggagaagagtggagagggggcatgggggtgggaatgaaaggtagcacagaatggttcctgacagaggcttcaacctctgggtgatgctgaggaatcccctctgggtgtgtcacatacagctgcagggggaggacacgtctagcaagaggaagacatctgggatgccggacttggagcagttatgctcatgatgcagggaagattcgcagagattccatattcggtgggaggggttccttgagatctgagagaggaggacaggtaggttcggagggagaaaccgcggctcacactttcatcaactcgtgagctctcagtgcctgaaggcagagcacgtcttccccattagtcatcagcattcagaagcagaaaatcagagctcgcctccctcctaggtgtgtgatcagctgccagaccctgagaggagtgtttcctacccaggccttttctccacagatgtgcctccttccttctccttaccttccgtctgtctctctttccctttctcttactatgtttctttgttttcattcttcccctgctcagtgtgactgttgcgatagtgatctctcccaaacacaggtcacttgggccccttcccacctctatcttcactccattctgcagagcaattccttccaaagcatcaagcatgttcaaatgcaaattgcacatcctaagaactcccttttgttcctaaggaatgagcccaacaccccggggagaccctgaaggcccttctctccctggctccagtccttctttctaatctcctccccacccccatatctccctgtgcacattacacacacccaagcagcttgtaggccctagggacgccctgtgtttccaccccaaatgctttcaccaggagattccttccatagaacgtctcttcccatttttcctcctagcccaaccaccatttcctctatgtaattttcacttcacttctttaccggtgttttcccagcatttcatattaatcattttctcctccataatttataatgtcttctgtattctctttattggtcaggagtgacaccatctttacaggactctaaggggaaagtgaaaacagaaaactgcctttgcctggtctctcctcctccctcataactaatcagccatccagatctcactgatttagcctctaaagatttctcaaatctattcctctctcccttcctaccgccattgccctacttcagatgcttgtcatttctctcccagaacatcgcaacagccttaaaattggcttccatgcctccggtctttctcctcttcaatgtattttccattctgcagtcactctgtactcttccaatctgtctaaaacacacatctgaccttgtccctccccagcttaaaacaccttcaactgaggaatacagtctaagttccctggcccagatatggccagagccccattctccagcctcatggttgacacctgtgcttccactgctccctcctgagcacgtggtgtccagtgcagcccaggacatacctctcccatctgtcctcttggtatatgaggtccctgtgcaggaaatgcctctcactctccaacacacacacacacacacactcaacacatgttcattcacacacagtcttgttggcttggtgaactccttctcggccttcaaaactcacttccattcttgctccacagtctactcctaactggccgtctgtagcatagggatctccaaactacagccccccggtcaaatctaggctaactgcttgttgtttttgtaaataaaattttactgaagccaggcacagcgcctcatccctgtaatcccagctttttgggaggccaaggcaggaggatcatttgagcccaggagtttgagactggcctgggcaaaagaacaagatccatttctacaaaaaaaaaaaaaagaaagaaagaaagaaaagaattagctgggcatgttggtgtgcacctgtagtcccagctactcgggaggcagaggccagaggatcacttgagctcagaagttcgaggctgcagtgagctatgatcacaccatttcactccagccttggtgacagaatgattctgtctcttaaaaaagaaagttttattgaaacacagcatgactttcattggtatattatctgcagctgcttttgcactacccttgcagagtggaaaagtcgagacagagaccataaatatttattctacagctgtttaaggaaacttctctttatataaatatatttaacctttatatatatatatatacacacacacacacacacacacacacatatatacacatatatatacacacatgtatatttgaatatttgaagaaatctgagaaatataattttgagtgaaaagcaaatttcacagtgatagtcacagcacgcacacagcttctgcacatgtgaaagcatacacaaatcagcacttgtaaataaaaacatacatataatacaaaaatttacaaatagactgaaagatacacattaaatacatggcaattattttctctgaagagaagaaaggaaaaaatttaggcttgttgccaaagggctttagctttatttttaatctatttattttaaaaagactggatgtaaatatgacaacctattaaaaactgatcatttggggcaggcacggtggctcatgcctgtaatcccagcactttgggaggccgaggtgggcagatcacgaggtcaggagttcaagaccagcctgcccaatatggtgaaaccccctctctactaaaaaatataaaaattagccgggcgtggtggcacatgcctgtagtcccagctactcggcacactgaggcagaagaattgcttaactcgggaggtggaggttgcagtgagccaagatcatgccactgcactccatcctgggcgacagagtgagactccgtctcaaaaacaacaacaacaacaaaaaactgattatttgggatagtgaaaataagggcacttattgttttagttttttgctttcatattttcagagttctcaacataaaaacaaacctttcttcagatatcacccccgttcagcccttctccactccttaatttccacatggagatactggcccctctcccacactttccttcattccttccacacactgaagtgtgatatgatcaaggcagttgtcaacattgtcacttgtatgattgtctttctcattggaatgaatgtgagctcactgaggacaagtacgattttgaatttatgccctagtgcgtgtccgaatatgtttgagatgagtttacctctcttatgcctgcaacaaaattttattttgtttaaagggtagttatttttttcttacatctccctaattagccaagagctccttggggccagggatatgttcttactgtcctctcagtccctgtggcccggcatccagctatcactcaaggaaggtggaaatgcgggatcaggacccagggcttggctccagacagcccatctccagtagaggcacaagcagtgggcccagctttaacttccgtaactgcccaggatgagaacagacagggagcaaactgagtaatggactaaaaagcaaggaacttggagagaaggttagaggagatcagattgtttacccaaagcagagactcaaaggcaagtgcacaaatctctgccacatgcccttaatttgtctactgctctctggccactgtctctgttttttgtttttttttttactggttccctctccatacatgaccatgaaccactagcataaggaggtgactgtcaaagtgtggtctcagatcagcagcagcagggtcacccgggagcttgtcagaaacgcaaatgctggggccgaccccagaaaccctgctacacagtttggtccccagccttccccctctatggcctaccttcacctctcaccttgggcaaatccacagtctcccaaataatccattactgtccggcactgagatctgtaaattcagggctctagcacagactcacccttgaactccggtcatgcctgagcaaccctctgcccccacttagcatctctgcttagagctcctgaaggccctgctgactaccacgtcctgggtgtgaactacccccaaatctggccctcgatccagctgcgtaacattgtcttccatctatataacttatctggaaagctctactattttctcaccctgttcccttccttaatccaccaccaatccccggatattttacattctacgtgtctgttacatccacccacccctgtgataaccatggcacttctgtctcagggatatttaaacatgaaaagggatcctgtttttccacttaacatggcactaccagaccttgcacagcctgaccatgctcctctgacctcaccgggcgacagcctctcccttgctctttgaggcccaggaacactgctcagcttctcaaacaggccatgcttgtgggcgtcacgaggcctctatgcgtgcagccccttcccttggcactgtctttttaccccagcccaccttcacctatatttattcctacttgcctttcgtagctcagttgtaggatcctcttgggggagactttctgtctgggcatatactttttgtttgttagttttctatagctgcaaaacaagttaccacaaacttagagacttagagcgagacccatttactggctcactcttatcttagggtaagagtttgggcaccgcatggttgggtcctctgcttcggggtctcacaaggctaaaatcaaggtgccagctgggtgctcctttctggagactctgggaaggaattcacttccaaactccttcagattgttggccaaattcagttccttgtgattattttttcttgtgagctgtcagccaggggcgctctctgctcctagaggccatctctattctttcctaccttgtccccttcatcttccaatccaggaacaaacaatctccctcacatcaaattccacccaagctttacatctccatctccagggagaatcctggttttttttttaagtgttgcctggttagaacaggtccactgaggataattcttgtatcttaagatcaactgatttttgggaacttaattacatctgtaaaatctgtgacaccaacacatagattcttgtttgactgaataacatggagaaggtgtatacatgagaaggggatcttggtggccacccgagaattctgctgatcacacagtcttctgacgtttgattcacagcagtctcctccaccacctttctaactttatctccactgagcacccttcgcccacactgggctggaggtttctgtctctgtgcctttgctcacgctggcgcctctctctggaatgccctcctctgtcatctttgcttaacaccaccccagtccctcctgtcccctcttctctgtgtccctgtagcactcgtcacatctaggacaaagcactagcaccgtccagcatggagtcactgctgctgagctcattagccctggtcagcctggcagcaggtggaggacaggaagtggtgctcattcctcgtggcctgagcccacggcacccaggccatggtggggtgcaggttagatgctccatacgttacagagtgaactgaaggaagtgaaacctggagacctgcagagtgactgctgagaggaggatgagaggagaaaagggagagggaagtggaggataattacaggagaaggctcgggacctcccctactatctgcacatggctttcgctccactcacaaaaggtcagtaaagccggtgccactggaagtcttggataagctacctagggtggggctgaggggctgcttttagagtgggggccccattctccatgtcacactcattgaccctcacaaaggatcaggcagtctgcagaacagacacaagtttggattttaaaaatatttatgcacaataaggttcaaacttttaaagctgatatatatagtttagctaaagttcaagtagctatgcagagaaagaaaggacatgatccatgtcccagaaattatccaagaaaatgtgagtggtggtttacatgtttggatttggggagagatcgtttgggttcaggatgggcagggcagtgccttttctctgggagcctgcctggtgaccctgaggacaggaccatctagaatgctaagagaaaccctcctcataccagtggggatctgaggtctcacagaacatgaagaccatggtggcagaggctgggcaagctcctaggctgggacttgtccacacatcccctgataggagcatcatcacaaagcaaagcagctgcacccacaataagtagtccccaggcatttgtcctgctttcctttgcttgtgtggttgcaggagatatgcagactgcactttcagggaagagggtgaggttgaagggaagagcagtgctggggtgaaaagagcaccagacagggaggaggcaagctgaggtccagccctcccagtcctgactaagtaactcaaggtgagcagctaataaaatagtgcagccagcgttagaaaaaaaccagacatcttattgtgtgaaattatttctattatcatagactagaatccataagctttaaaatttttaattgccaaaaaattctaatggaaaaggtatagaaatgctgaaatgtctacttttgactgtcatttaccacttcagcatggcgatggcaatggctttcgtgtatttagtccctcaactcactgtgcagttgctttgcagaggcagcagtcatcctgccagctcttggccttccctgccacccagcagagtgcctgctgcccagtcgggtcatctggcagccacagcagaactcgctactcttggaaaattgcttcccatactctaatgtgccctgttggcatctgtggagacctggaccccaaaaaactgttcaagactgaccataaaagatttagagctggagatattactttgaaaatacttcctaatatataaattatccggaaacgggctccatgcctgctcattagggcaatgttttaacttggcttccatcctagagtattatcggtccccacaattaaactaaaatataagtgaggctttcatggggtgggaaagaagggagtttgaaatatcaattggttcaggatgcctatgaatatatattttccagtggtggtgcttgactctcaaagccaggtcctggcagctgagcctggccaatagcattggctttgttctgcgatggcagtggtgagactggtaggattctttatttcttttatagaaaatcaaggtaatgattagagcagtcactggagtgactgaatgcttctttgtgctgggaactatactaaattatttaaagggattaactttttcagctgtcgaaatgaacatatgaaatgggtcttattaacagacccagaaactgaggcaaaaagctaaagacatttcctttagtccagggccacaaaccagcagctcagagggaatttggacatagacttttcttttttctttggccaaaatagaaataacaacgtgtgtgtgtgtgtgtgtgtgtgtgtgtgtgtttgtgtgtatgtgtgtttgtctgtgtgtgtgtgtatttttctatctttatctctatttctatctctttcaatgtctttgggcagggcataaaatgcccaatttgccacagaccccaccagtccctaatgtctttcaccttgcactctacacatatttattctacccgtttgccccttgaagacactgagttgttaacttcgcgtggaccagtcaacagagctagacttggtcaacagggtggggcggtgtcttggggaaacaacagtaccctaaattcagttcttctacaggaggggctcacctagctcctctgtctttcttatctcttttctagtcctgtcactgaagccacctcagaccttttcagagctttgtttttggaaagtgtctcctgttgggctctccagaagcaggtgctgagatagaggggtgaggggcacgagttgtacggagatcaacagctaacaggactgggagaaagcaggattgggaagaggaggtgaccgagtagtcaaggggagctgggcccagggagtcctggccaggggggagcagcaggtggaggacctggagtcctaagtccagcttcagactaaagaggtcaggcctttttaaccaggccctgctaagtccctgctaggtgatatttagaaagtgtgcaccagacaggcccagaagccagaggctgtccgctaaccatactccagtagctgggcaagtcccccccgaagggcccctgggcagccgtctccacgtcaaccacagaaggcatttccaactccaactccagttggtgttaaggtcagatctcctctctggtgtggcctatctgccggagcaggtggactctctctgggtctgtgtgtcctgggcggagccacctgggatccaaagcacaactaggagaatctggaagggggagggaggactgaccccacatttgcatgacaagaagctctaatgtcaaccttcctcaaggccatctttctgtgcctcaaagaaccctttgtctaaacctaatcacctcccaaaggccccatctgtaaatgccatcacattgtgggtaaggacttccacagatgaatttgggggaacacagtttagtccataggaacccttactatgaaaggcatcagagagtaaagacatctcttaggctgtctctaggcagacaaagatgactgagcacacccattttctaccttccaaactgtaccatttgttttccttatggtcctgtagagtgaggtgaccagtagtattttggtttgatttcttagaaaaagctcaaaccaaaatgaatttcctaacattttcacctaaaagctgtaagcccaggctcagcagggatgtgttttcactctcaggagaaagatgttagggatctagcacaactttcttcctccccaaattctctttcagacactctgggagaacttgagcaagggtgagggcctcgccagcacccagccatgcacccatgggcaccctggccctcaggccgccagcctccagaacagtgagaaaatagaaaagggatttctgttgtttcagccaaaaaacataccttgcatgcacattagttttctattcgagagccctgatatccccctcggggtttctatgtgagcacttgaccatgtgtgagtaggaggggtccttgctcagtgcccaggtgttgcgctgtaccccatgggttccagtggggatggcactgtgtctgaggggctaaagaagagacctaagacagcaaccaagacacagggtttattgaggcgacttgcatagagggtagtccagtagccgcaggctggacaggagaaccactacagtttgtaacaagcatgccattcatatagcatttcacgtagcaccctacacttaacccaaaacaaagggcctcgactccccgtacagactgggttccaagggatgggccaggggttcagatgtccttcatggataaggagtggatttctttctttcttttttttttttgagaaagagtctcgctctgtcacctaggctggagtgcagtggcacaatctcgactcactgcaacctctgcctcctgggttcaagcaattctcctgcctcagcctccctagtagctgggatagacacacatcaccatgaccagctaatttttgtatttttagtagaggcagggttttgccatgttggcctggctggtcttgaactcctgacctcaagtgatctgcccacctcagcctcccaaagtgctgggattataggcgtgagccactgcgcctggccaggagtggatttctgagtggaactcagattcgttagctcggggctctgaacacacattcttcttagaccatagggtcattcttggggtcggcttcagttatggctgtcagggggctctgccacacccaggggctgttcgatgctgcagagtgaaaggcagtagctgcagttgggaacctccctcccctccatcccctaccctgtgtcactgacgaagacgatgccactgaccacatcccgcatagggggaaggctttctgggaatgtcactcctccttgacaaggagcagggggctcccgccatgtcttgggtgtatgttcctgaacattgggatgatgggcaatcttgggctgcactttttccaactctgctcctggacccgccctcgtgctgtgggtcccatccccaggccctaagcagctgcttaaatggagctgcagaagagccaaagcttccatcactctcaccctctcttagcttcagtcttgactccttctctgagcccctgtacccatcttgtgctgcctacgtcctaccttgggctgctcggtattggctggcacaggagacccagagctccgtgacatcagggacggggctggctctgtggaatgatagctgccaacccagcctggtgcctgtgttgtgcaggatgcaagagccgcaagcatatgtgctgccactcggggcacctatgtaagggcaaggacaggacaggctctgggggctgcaggtgatgttcccagtgaagaaaatgttgtggcataatgttgtccctggtcatttctggggacccacagaactacctattctgtgtatatgatgtctcacttcattatgcaggaattttggccactatgaatgagctatgaggaaaccaggtggcatttgtagcatttcagagccattctctagtgcactagttctattagatagtctacaaatcagcggggagggcactggaagggtgagtttttaatacatttgaaaatatttcatagtctttttcctctttgaaattcttacagtaaataaaacaagtttaactcagagcttcataaatgtaagtggccatgaaactctcccttttgtgggacaacctcctgccactgacaccccctttcacgggggaggtggcctgcagtccccagagcctgccctgtgatgtccatcagaagtacctgggaagggtagtttgagaagcatcagtctgactttctctttagaaaatcaagcccattccacagatatagtcagatatctgtgatgttatcaactggcctgccttccaattcagtgtgataaacacttattaagcccccactgggtatgaaatactgagacaggtggagtgcgaaagacagataaagaatgcttctatgaagcttagagcctatgacatgacagaagataagttaggaagaagaatggctctacaacaaggtaaattgcttttcttattgattaaggtaagtgttataaaatagacagaatgtcatgggagtcaaagttaaaagagaaaaaatctgtatccagctgggacaaccagagaaggccactatcctgaggtcctgaaagatctttccgcctgcctgcctgaggtcttggcttgggtatctcaaaccaaattcaagagcctgaccctataaacccggtgcttctcccctgttctctctctcagaagggtaccagccacctgctgcataggcagacaccctgaagtcttccttgtctgaccctgcccggccatagagaaatgtattcatggtgtttttgtctttctctccagcacttgtgtcagcctgtggtgtcaaacctatgcatgtgttcatttaatgagtgtctacctcccccactctttgggagcaccccaagaacacacatgtaatgttcctgctcatcagtgtagtctcagaactgggttaattcctggcaccgaggagtctccaaataagtgacgctgaataaatgcctgaaggaacaaataaacaagcgtgtggactgatttcagaactcacccttgattgagagttacagtgtgtagaaatggaggaaaagcattttcagggtggaaggaatcagaggagcaaagtcactgatggcagcatggatccttgatagaatcctggaatggaaacaagacactggcgaaaaaactggtgagatctaaataaagtctgtagtttaggggagagtgacgtgctaatgttaatttctcagttttggcagatgtgccctgggaatttaagatgtcaacattatggaaagctgctgaggggtagatggggactctctgtaccatctttgcaaagcttctgctgtaatctaaaatttttataaaattgaacatttattttaaaaaaattaactttctttttgccccagaggaaacagagaccatcccagtcaaattaaagaaagtcttggtagttatgaccaatatcagagctttggtcctggagtccttggaattaataaaaggaacacacttaagggtgtttttctaaaaacaaaacaaaacgaaacaaaaaacggggtgagattcatggtgggccacagcagaatgctgggggtgttcagggcatgtctctgacaggtgaggcacagaccagcagagctccttttctcctccccaaacttttcctgctgttcccttgccagatactggcttgaggaaactgactcggaggtccttttcagttgaaggctagctcaaacctccagactcctgccctgggaccctgtcctgccaaaatccccttagatccctgtcactagctctgcatgccagtcccacagctctgttctttgctggtccttctttgggggtcggccctaagatgctaaagtggccctgcccatgggaaatgcaggatggctcacagccagtgactggctggtgtgaggctgcaccacacagctccccgctaggctcaggacagactctgaggtcgactcatgctccagtgctccctgtggggtctgcctatgtctggggcttctcctgaaatcacactcttgcttggcttccttctttctgttttctgtcctgcttcttccacacccttggtggtggtgtgtgtgtgtgtgtgtatgtgtgcatgcacagacatttttcagaatttccgtaatcagtccttgctttaaaatctaattctaaaaaatccagaacccagacactaagaattggttttagcatcacaagacctgccctcaaaatctagctgtaatacccaccagctgtgtgaccttggagaccatctccccgcccctcttacctataaagtgaagataatcacatctgcttcttggctgatcgtggtgcttacacaggttaactggtgtcaagtacctggcacctttcctcagtccctgagtgcacagttcctgagcatcctgggcccctcttccatgtgaaggctgtgcccatggacctcagataaactccctgtgtgtctcagtcaatagaggatattagcaaatgcttagccaagtgttctggctgcgtttactcccacatccaccaacataaaaagtaaacagcagaataaattgcccatctgctgccatcaatcacaaatacaatcttcgcccactgtaacacaaggcaaatacagtaatgacaaaatccatagctggggaaatgatagagtggtggccaggattttcctctctccacagccccagtccatgttctattatttaaatgcacagggagcaaccacggcgatcaatatgttgcctgccttcgctgtcacaaggcaggctggttgctcgggcctcgaacttagggcctctggatggcatgcttcaggcagctcagttctaggtcagtggaccctgagaggaagaaaagcaaagcccccagtcctcagagatggaagaagtcaccagaaggaacaagacaagaatatgtcacaatggttcagtacctgcacatctatagagtaagtttaaaataaacgtttctggtttcaaaagagataagaatgttcacaaatatggaaaaacccaaggaagaaaatcttaaaaatgtatgattttacctctccccaaatagtcactgttaaaatattgctctatatccttttagacattttctcatcctggtaggcatatgcacacatatatacaaagttgaggtaatgataggtgtccaactgtgctcttcctactctctctgtttggttcactgcagcctctgcctctgggttcaagcgattctcctgcctcagcctcctgagtaggtgggattacaggtgtgcaccaccatgcctggctaatttttgtatttttagtagatacggggtttcacagtgttgatcaggctggtctcgagctcctgacctcgtgatccgcccgccttggcctcccaaagtgctggaattacaggcatgagccaccatgcctggccggttctatcttttaaaaaagcctgctagtttaatagataaaaataatacttcattattctaccttgtgttaagtaattttactaacaatataatcttagtttgtttgctattggctctgtttgacagatgaaaaaaattaagttcagagagaataagttgtcagccagcatcacagaatttctggcaagacggcgcctgtgagggtgaagtgtgcgcttcccggctctaaaatccctgttatgtcagaataattgttaataaaattctttatgaaattgccacatcatggcatttacacatcacacatttgagtttaatgaaagagatttgagcaatgagtttgacaaaaggggaatgtaaatctggccacaagaatatgtctcttttgttcttagtgaaacccttggttgttcaaggaggggcaggccgtgtacatgtgtgcacatgtggatgtgcacacatgcatatatgtgactgtgtgttttagggggtgctggtgtgagctcagagcacaagaaggggtcctgccttttcccactgctcactggtgtttttttgcataattataaaacagagcctgccatgtcacatagggaccgctgctggagcaaccaatatccctgggattgatggcattcattctacagacatttcttaaacagatgtgcttgtcattgaatgaaactatgaacacaataggaatagtctcttccctcactgggcttctgtctagttgaacaaagcagaaagaccagccactgatagatcacgactcatgtacaaccttgggtaatcagtaaaagatcactgatgtggacagatatttacatggaccaaacgcaagtaagccaaacaactatcttaaagtgggtgtctgggcctcattagcatgctgaaactaatcaaatgagtgagaaaataatatatctcctgggttgaattcagcaaggtcttctagggtcaattacaagtacaattagcaaataaactcatagattatttcctgtttacacttcaaacaaacctgactttgctgatttacacggcaggttgcaccttgattataaattattaagtggtcaataatgaatggcattactgttttaatttccccaagtatgtttgaatatcacagcaaagagatgagatcagtcaacacatttgcatatcgtccagaaagacataaagcagaattaaccgtactttggaaatagatggctgaagagaaagctcacccctgagtttacattgcaatcctgataaatctctccccagtaacgctggcaatgaactctgagaggaaggagagatcgggtttgttaaattgcattgagtctccagctctcagatatggatgagtaacaaaagttccatgtatgattcttatcatgtgtgggtcattacagccatccattcacagatgtaagagctgtgctgggaatctggtgtatgacactgaaatccctccagtcagttctcatggagagctggtttcttattgaagatcagcagatcccgaagacactgtggagcctcctggagattcagactcaaggcttctgcccactcacatgtcctcctgctctcccttcagccccctcattccttggaagctcactcccctcctcccacatcccgtctgtccctccatgctgccccagagcactctctgaacaggtgcaccctgctggagtctgagcactgacccagcaaggcaagggctcctcggagagacacaaacggactgagtgaggctggcaggaagccctttcaccccccaattattctggtgcttgctgtttctatcaaagtagctacactgaggaaagagacttgccctgtgtgtgcactccgggggacaggcaggccactgtcacatgcccccatgcttgccctgggcttgttgtgtgcagcaagcactcagtttatttctgttgaatgagtgaatgattgaatgagagcctccactgcagctctgggctctcaggaaactgcggtggcctctgtcctccagacacccctcattcagtgttggttgtcatagccattccagccactcttgaaaaacataattttgaccctcattttatcttcatggggtgcatgtgcaggtttgttacatgggtatatgtgtgatgctggggcttgggacacaaatgatcctgtgacccatgtagtgagcatggtatctaacaggtggttttccatcccttgtccccaccctttctttctctagcagtccctggtgtctggttcccatctttgtgtccacgggtacctgatgcttagcccccactgatacacagctactttcataagcacctcaacttggaagcaacgggatgctgggctcccagtggagggcatgacttaagtttacagaagagattcacttgttgaagggacctgccgtcttctaaatttgaagtccaatttgaaaaactgaagtgctcttagacatgtgcagccttccagtaatttcccgctgagttccactgcacttcccagagtcaggctcctcctctcatcaggcctaagcatttaagcaccaagtgaggaaggaattcaaacagcttcgggacatgtagggaggatgacgagaaaaggaggagtgtgaaatgcctcccaaatatgtaacaacttgccaggtttttccagaaaataagcaattccctctgtcccccagcttctaggtgcaaaaagaaaacagctggatttccaaaatacaaaaggctcctgcctcccagttcccagatttgggcagcagagggatcatatgtccccagctttctccaagatagaggcttagtttggggatgtttcatgtaaatggggactagcgcacccgagacgccaaggaacaggatgggaaatgtacgagtggcaaagaaccctggttctgtgatttactggacatgtgacttgggaaaattgcttcctctctctaagcaattttttttttagttcataagctgtagatatgaatactgatctcttgttgctataaattatctcacatattaaagcacttggcacatggaagtctcccaaagatttcacagtcactctggctcagggtttactcctggaggaaggactttcttcccttcatttgctctcaagtccacttgactcccttggtcccactggcctccctcttgcacctctgcccctgtgcaggccatgagcttcacgagggtgaggaagaaggcgcaggtgtgtctgttcacagccttgccctgcatggcccaatcctggcacatgatggacgctcactgaatacgtattgggcgactgactcaacaaatcctagaggccatcgcagggcacaggcgtcctctctttttttctgcagaactattccacactttatgctgttccttgggcttccttaagcttctggtgatgagatgaaagcttattatatttcaatctattctctttctacctttaaatattggcattttactgtaagaaaagcagactttattttcaattcatataaaattcattttttaaaataaaaaaccctaagaatttaaagaaagagtaatcagccaccaggacttctttgtttttgtgacatgtgcctcccaggcccatgccacgcattcttcaactctctcatctctaacacaactgaaattccgctccccatgtggctgctcttgcagtaaaatgacaattgactgccaactttcctgagtcttcagcttttctcttacattcaacaagataaagaagcattggaccaggggcccagagtctctgagctgctttctcctcacctgtatgtctcctaagccctcataggagcagcttcagtcatggagggcaccatgctcaggttgtccacagctcccaggtcatcagcaaccgtctgtgactctgtgcaaagctgaagggtgacgatccttccaagacagtcaccagaacactgtgtgtgtggggagaaggtggacagaggaaggaagagccctcctggcattcaaggcttctgaccacaacctctccctctgtccagagggggcggggtctccaagccacagggactgcatgctcagataggcagttttgatgatgctgcctcccctactccacagctcctcatccttccttccctccaggcctttcacactggggaagagggtgttttgcttgatgccttttgaagcctgacctcaaagccaagcctcaatccccttcttcaaaaagcctttcctggccttcctgaggcctcccccacacccctcaccacagtgagtttcactgtctgtcagtgaggttgcacgcctatgacacttctgttttcacagtttccctgcacagagcagtgggtaagtcacagaatcagtgtcccatcacttaccggctatggaaccttagccataaaaaaggtcttcatgaacttcagtttccacatcggccaaaaggatgataacacctaacacatggggttcttgtgagggttgaattagaataattcctgtgggcagatggcctctgaaagcgtgcaatgagatttacaaggatgtcaatggcagtattgctttagtttttttttttgtttgtttttttgttttgtttttttgagatggaatcttgctctgtcatccaggctggagtgcagtagtgcgatcttggctcactgcaacctccgcctcctgggttcaagcaattctcctgcctcagcatgctgagtagctggaattacaggcacccgccaccatgcctaatttttttttttttttttgagacggagtctcgttctgtcaccaggctggagtgcagtggcgtgatctcaggtcactgcaacctctgcctcccgagtttaagccattcttctgcctcagcctccctagtacctgggactactggtgtgcgccaccacacccagctaatttttgtatttttagtagagacagcgtttcaccatgttggccaggatggtctcgatctcctgacctcgtgatcctcccgcctcagcctcccaaagtgttgggattacaggtataagccactgtgcccggccaacttttgtatttttaatagagacagggtttcaccatcatgttggccaggctagtctcgagctcttgaccttgtgatccacccacctcggcctcccaaaagtgctgagattacaggcgtgagccaccgtgccagccagtattgtttttaagagccaaaaattcaggaaaactttttaaatgccaccaaaacagaattgattaaatagattttgattacatcccgaagtgaaatattatgcagctattaaaaagaataatcttccttctcagtcttcctcatggtccaaattgaactgcatttcataataggaaacagattgagaagataatcgtagtcttcaagatagacaaacagtagggttttctaaatgtcaaactcactgtgagaaatcctaagctcctatatactatatatgagtgaagcattttgctcagtcatcaactgacaatttttcttctaagaaagaggctgggttggggggctcagtggctcacacctgtaatcccagcagtctgggaggctgaggcaggcagatcacctgaggtcaggagttcgagaccagcctggccaacatgatgaaatcccatctctactaaaaaatacaaaaattagccaggcatggtggcacgcacctgtaatcgcagctactcaggaggctgaggcagaagaatcacttgaacccaagaggcggaggctgcagtgagccgagattgcaccactacactccagcctgggtgacagagtgaaactccatctcaaaaaaaaaaaaaaaaaaaaaaaaaaagaggccagcgcactgtccattggatccatagttctcagactttgtactggatgcttgagaattgctgggatcccctgggaagctgagagaatcccaccataaggctcctcaacttacttacactctgacctcatctgcaaaattccttctgaagcctgttcttttaccttgaaccttggaattgttccataattttcaccctctgtatttcccccaaatgcattcagaggcttctcctcacacaagtgtctgccatttattggtggagcatttgctgtgctctaacagggacttaagataggaataataatgaaagtataggaccagagcctgctgcgttgtgcagagccattcaatgccagcctgccgcagagaggcatcattgtgtctgattgggggaaatgattattttttgccttgtcttccactatcacctatgaaagcctcctagagtgtctttgtcttccccacacacatacctcacacatctgactcactgctcttactatgtttcgggctttgggaactcagtccattcaaattccatataaacactgatgaaccagggcccaagtgagggtggactgtgagtgagaagcctctgatccgggcctctggctctacaggagctcatggagctgaagtggcaatgcctccagctctgctgctggacagacctgaatgcaaatctgaaccctctgccaccctgtttgctcatttacagaatggtgtggtatcacccatctctttggctgcttgtgagaattaagagaaatgaggcgtgtaaagtccctggagcatgggaagtcctcccaagaaagcatttcttgagctgctggaaaaacatctcctaagtctgaaagaacttcgagcagtcaggtggtaaattttgtcagtaaattattacagaataaaagcatatgcgtgtacattgctataaagcatatcagagatttcaattattaaagcttttaaacttctgaaaactgctgcaacattgcaaagaagataaccacaggattggaaactgaacttaaagaacatcatagtcaacatgaaagaacactatttgcatatgatgtttcatataaagtatctcctaacaagggagctaattctaaaattatcttttataatttatcaatgtaaacatatggtgatagaatacataaacagacatttaaaattatgtacaaagcaggaagtcctttctttttttgtacgatcttcaccaatttcagggaatttcagaggacacattaaaatgacattgtatgaacttgcctttaaaattaaattcagaattatgcaaaaccgattgatgtgaagacataaaacctcttagaaaatttgttccacaaaaattatcatctttagttttactaaaaacttttcagaaatgtatcccaatactgtcactcacaatttttaacgactccaataagaactaaatcagccaaaaaaaatcggtttctaaaattaaaattatcaaaaattatttgtgaccttacatttgccaagtgactgacattgctttcaaatatgtcaattggaaattaagttgctaaaagtaaaatttctgatgacctgataaatgaatttgcaaaaatataagcccgagaaatttatcatcaattaaggtattatactgataaattgttatttgttgtattgtatgaattatgacacaaaaatattttcttaattttaaatttatattgttgaatatcatgattaccttaatgtattacaaataacattatttttaaaggataaatctttatattttagtgcctttaactacaatttttctgcttttatattgtgacaaaatacacatagcatacaatgtttcattagtgatattttgtacgttttttcctgctttttgtataagggacccgaaaataatgtagctagtttagcatatcttcacccattgcccacccccttcccctcttcaacctctaatacaaagggccaaggattaaaatttcattgctcttgaatttcaaccaggaagtggaaagtgaaatttctaggtaacaaggacttacgcaagatgtaggtccagtaagtatcggaatcagatgccagccccagagccatgcttgtctagaggagcacacgtcttgttcacagtggggatgagatcgtctgtctgagattgaggctgagttagcagcatctgtagactcctgtgagcaaggctgccaagtttggccctggtgaaccccttggcctctccttcacaaagcctcctgctaccatctgcacatccccaacccctccttcacctagaacagtcctgtccccaggcgttcccttctgctgttagtgaggctgaagctaacattctgagcctctgagggggatgatgacagcagctacgtctttgggtgatgagtgttatggctgcagaggaccttgcgagggcggggctgagtggtttggaagcctatttcctaaggcaccttacacactagggggattccatggtcagagtaattaaggaagggtggataacacggtgcttccgaaggatttgttcacagagcagcacattaaatgtcctgagaaattccagtaagacacccaggccttcccaatcttatctggctgcaaggccttagaactcctaacagttcctgggactagggctccgcagaacaccctttaaaatatatgttttttgttcactgctctaattttaaggatggggagccaagattcagattcaagggaacacacttaagatcataaagtgagatccaagaagataatgcacatttttattccccaattttaggttggtcttttaagagattcaaaggaaggagcctctaatggtgacaatgtaaggctgataattctggagtctctattgtgcgtgtgtatgggctgtgtgtgtatgtgtgtgcatgtgtgtgtatatgttttgtgcgtgtatgtgtgtgtctctgttgtgtgtgcatgtatgggtgtgtgggtgtgtgttggtgtgcatgtgtatattggtatgtatgtgtatgtgttgtgtgtatgtgtatctatctgaatgggtgtgtgtgtctgtgtgttgtgtgtaatgtgcatatgtgcatgggtgtatgtgtgtgtatatgtatgtgtgtgttgtgtgttgtgtgtatgtgtgtatgggtgtgtatgtgtgtatgtgtttacggatgtgtgtatatatgtgtgatgtgtgtggatatgtgtgtggatgtgtgtggtgagtatgagtgtgtacaggtgtatgggtgtgtatatgtatgtatgtgttgatggatatgtgggtgtctatatttgtgtaagtatgtgtttatgtttgtgtgggtgtatgtgtgtgcatgtgagtgtgttgtttatgtgtgtatatgggcatatggatgtgtacatggatgtacgtattgtctataaatgtgtttgtgggtgtgtgtgtatatatatgtgtgcatgtatttgtgtgtgttgggtgtatgggtgtgtgtatgtgtattatgtgtttatgaatgtgtgtgtatgtgcatgtatgggtgtgtgtgtgtgtgtatttggatgagactttatctgtatctctgcggtggtatgggagctggaacccttcctactgagctgccctctctgttccggatttacagcaggactaaacagcaggagaaaccaatgaaaatacagtccactaatgcatccagtctggacggggcagtgaatggaggtcaggaacttctgtggtgccagtcccagctctcaggctttttcagcagctctgaggaggtctcaggcataggttccaaaatcagaagccttcaggaatgagccattctggatagtcatgttttactggtcagtgagaatttgtttcctttaaaatcaaaattcttcaaaatatattaatcattttggaagaaaaatttttcatattttatagtttgcattctttcttgcacagtaaggaaatacactcggacatattttggaggtagttttgaatttttgtttttgctctctcgtgcctgatgcacagaccctcagacactatcagagcctgccttttgggacataaaggtcattttgcccctatactaagcagactgaagtttctacattttacaccactgtaactgctttatatgttttcctggtttccctgtggcgcaagtctgcagtctcattttcgcttcttcctctgcttcccacatcaccatatttaatttcctgccagacctgcatgtgcgagctgcctgatctgggaaagtcatttgatctctcagaaactcctttcctcatggtaaatggtagtagcattgcttgcccaacagtgctgccatgttgagtaagacaccgtgagtgccttagcctcccgccctcttcttccaggctttgctggagccctgctgagggagcctcatgggctggatgctctcgctctctctctccttctctctctctcctatgagtcactcttgtactgttgtgtgatgcttccttctagcaaatcactgtattgctgaataacaccctctatagagctgcaagaaactcttgctttatgatttttttttatttttattttttgagacagagttttgctcttgttgcccaggctggaagtgcaatggcgccatctccgctcactgcaaactccgcctcccgagttcaagcatttctcctgcctcagcctcccgagtagctgggattacaggcacccaccaccatgcccagctaatttttgtatttttagtagagatggggtttcaccgcgttggccaggttggtcttgaactcctgacctcagctcatttgccagcctcggcctcccaaagtgctggtattacaggtgtgagccactgtgcccggcctgttttatcagtttttaaggtcttgcttgattttaaccagttagagaataaggtattttcaattagagaataagagaaaaattctgctgttgctgttgttgctgtttttcctatctgggctcttggtattgggctgcaggggagagaacgttcttggtgtctgtttggctaaaattctattgagtgagatggcagtcatgaggctaatggtgatgattccactcctccctccttcagagcccacgggaagacagcacttccccatccctctttgaagtgtgttgctgcatgtgacatgctttggccagtgaaatgcaagtggaagtgatgtttgttatttccacacccaggttgtaattgcccatgtggtcttccctgactgtgctaatcatggagagatgggtggaagtggtgcctgggctgcccaaatccctgaatggccacaggaatagagttccccgaaagcttgtgtttagacacagagcattagcaagaaatagtcttcttttataataagccactaactttcagggatatttgttactccggcataaccctgtatgccctgactgatacagcaagtaagtaaataacatagttctctcccaagagtctttattagcagcctgtgaagtgcttttttcctctgacttctcatttcctcttcaaggccaggacacctagcaactagtctcaataacccattcattttctttgtggatagctctggaggagaaatctacagccctgcccagctgtgctctctgtttctgaccctgcagccctggtttagactcagtcgaacatttacccattatgttctagacctgtgtgatggtgcatctcccctccccctccatcacattttggagcacatggaagcttttccaagactatttcagcttgccagtttcctgtcagatttttcattgtatatttttctaattaagttaattgaatcgaaaagtctcttcatataaataacagacctctcctttctctcactgcttgatgactttcaactacaaagtcatttttttcctctcttttatttgacttcaggcaccctttgctaaacacttataattgtcctaatataaaagcaatgcaactgatttccacactatgaaaacatttggagactgctgtgtgtgtgtattcatatatttgtaattttttaagctctagcaagagcctcatcttttttcccctaaaatccctttaacattcttagcctagctgagtgaagatagccacaatcctggctcagtatagtcacttgtaattaccttcaggtgcaaaagagttcttaatgcttcaaattctctttccactgtatcaaagtaaatagatgtaatttattattgaaagcgctgctgctatgccgatgtagtgggtgggagttgacatttgggatattgtgtaatgtataatgagtctgaaatgagtggttctgatccagtcagcatcacaggcaatttccctggtaaggaaaaatgcctgcaaattaagttgcatatcttcactaaggcagggaatggcataaactgtggaaatattgattctgattctgcttttcttagaaattgctctggatgtgtattcagaaacatgttttctctgagacagaaccctatattttcagccagaatgatgtttgaaaggcatctttggtaaggactgtttctcagatgctatgaaaatgaaatcaatggggctaatttctccttgtcgctttctatgaatgctgcatgagggattgcagaccagccacaaaatcaggctgaggaccactgttccccgcctgtccttttcctctgcagcccaggctgtgcagagtggctttgcccaaagggagatccaaaggtggggcttgctcagaaatgacaggctgggaagttattttgtggctaagaggaggggagaaaatagctgggaaagagaaatgacatgcatgggctgccaggagaagatggaagagagagccaccacctgtaaaacagcaacattatggaactggaaggcaccaaccacaagatgaagaagtgcgtaaatttacctggaaatcacactgaaacgaggccagttttttacaccacttcaggaactagcaggtgctctgtctctccagcctcactgtctcattctccttcttacccttgctgcctcaattgattgcagaaattacattccagaccatgagtaaaggactcaatgttgctgcccgacgagtcttttctgctttctgacaacactgttggtttgcacagattcacttaaaagtgttaaaaatgtcagacatctgttaaaaatgtcagcagtggttttgctccactcttcccacataccagacaggaaaacagagacaccaggtgccctgcaaacttcccttagggggatgcctgttcttcacaccatggattcaatctttggaacaaaatcaccagctttgtaaggcctcaaggtacatcaattaattacccccaggaagagccatacacagtcagctatcaaagggggatgagacctcaacatactgtgggctgtcgtctgtcacccccagcactgaattcagttcttaccctcgctcacctgtcctgggctcagaggtacatcactgtagaccacagcacctgggatttcttccctctgcttttctgtttgattttaacaatgaggtgcattgtcaggagatgcaagggcagaaagagaaagaagttaaggcatgtcttttccctactccattcctgctttataaccatgtttctggcagtggttaatccttccatgaccacagatcctagatggagcctgatggttctagctctcattaggccccagtaatgccattcctcccctcctgtctttattcctaggggatggagagcttgttgctagtatttggatgtctcagcatctctttttagttttcattatccctacctgtaactctatacactgtccctatattgtagtctcttcattgaaccatctggggtgccttccatttctcaatggtaacatgcagtctaagttcaatagagctaaggagccctgaggctgaagtagccagggaagtctttccaagagagatggagcttgaactgtggcttggaggaattgtacctatctggactctgagtttgtgttttaccatttgcaactgaaccacttggcttaagcagaggaatatttggtttatgtaactaaaaatttaggggcttcaggcatgtctgaatccaggacctcaaatgaaataaatctccttctatttcttagctctctttttattatcattattattgtgtcattccctggcaagttctctctgacacaaaattgactctaggaagctccaggcataattcatcccattagcacagagtctctgaaggaaagagcaatgctatctcttctaacacgcaaggcaacttcttttacagaaccccattggtcttattcaggtcatacccctcttttctcctccccctgcccagaaaaaccagtctccagagaactggggcattctcattggctgatgttttcacacctgtggctaggaagtgagggcctttgggttgagtatgtcctcatgctggaaaagaacaacttcctgaaggaaggaacgtgaaagacaaaaagagtcatcaggctaggtgcagtggctcatgcctgtgataccgacactttgggaggcgggtggatcacttaagcccaggagtttgagaccagcctggccatggccaacatgctgaaaccccatctctactaaaaatacaaaaattagccaggtggcatatacctgtggtcccacctactcaggaggtggaggcgtgagaatcgcttgaacccaggaggtggaggtcgcagtgagccaagatcatgctgctgcacttcagcctgggtggcagaatgagactctgtctcaaaaaaaaaaaaagagtcattgagatccactacagatctcaacatttcacccacctggtctcaaagccagccaaggcccagtgggataatggttaaaaagcctcttccctgaaaatgagctgattctgaacccaaacatgggcctctaagttgaatggtagggtttgtatgagttgtcatgacctggaaaggcactttgctgcatgaatcgcctctgtccctgggactatctctaaaacttctagtccatagacctgcttgacacagaggcccgcaattcaactctgaaggtcaaggaattgaaagtaatggcagaagatcaagcatctcttccacccccatcttttaggatcacccagagaaaagtgttgctaatagcagcctctttgtttctcaaagaccaacaaagcttgtgttagcatatggcctgtacttatggccaaatgcatctcccaagcttctgcatcttatctttattttaataatttttatttttaactgatcatgcagtgacttccagggaagtagactacgacttcctggaacatttgcatttttgtacatttaaattattgttagctttgaaagcagggcaactgccttaggaccacaaagcactctactcaccctactgaaacagatagtggcagtttctgacgaattccacctaaaaattttaagatagaaaatgtgtgtgtgttgtattgtggggcgatggggaaatggggcacagtggcatggatttgagaggctcaagactctatttctaagatgccacagcttcaaagggcacttttctaggtaatcttaggagacagcaggccttagaactctatgtgtgtaactactagttcaacatcttgtttcatgagtttgtgtccaactttgattttttcttagtcaattcaccatcattattgcactcaacgagatcataattccactttgatctattcatggtgtctgtgtttaccttaaggactgaatttttagtggattcttaacttagctgctgtatttaaagactcatcttggctgaattacatcataattctgaggcttctttgtttttccagaactatgaacatttattgccatcatgggatgccttcaccaataggccttgaaattcagaaaaagttaaagaaagatcagagacttggtgccatgtaaaacttgaaattcatgaccttcaggcctggtgcagtaattccagcactttgggggaataaggcaggaagattgcttggtgtcaggagtttgagaccagcctcagcaacacagtgagaccccatctatacaaaaaataaaaataattagtcatagtggtgtgcacctgtagtcccagctacttgggagtctgaagtgagaggattacctgaaccaaggagttcaaagcttcagtgagccaggatcacaccactgtactccagcctgggtgacagagaaacaacctgtcaaaaaaaaaaaaatcatgatcttcagaattcccaaagatgattggggacttgctaagagagatatgatctcaatttgctatgcatcagagacttgccaagggattgctgcacactggctctaggccagccccacaccaagcccttgagagggaaaacaagatactcttagtctatattggacaccaagagctaccaggagctctcattttccttaatcttccctgagctctttgaggcagggcctattgttacttctggtttacaagaagaaaactggggcttggagaggtgaaggaaattgcctgaggctaatgagctgataagtgggaatgtcagaatttgaatccaggctttgtgactcagcatcttgagagcccactactgtatttgactcttcttacaatctagtgtctaaagcaatttgtgaacaaggccatatcttcctagttgatggaatgctgaccataggtgtaaaaagctttgattaaccagagcacttgtcaaatgggctttcctagttaatgaagaccttttgttaagaaaagtgagggggagaaggaggagagcagatagtggtgataagcataatagcttttatggttttaatgtctcccccaaaatttatgctgaaatttaattgtcattgtgacagtattggggtgaattctttaggaggtgattaggtcatgagagcagagccctccagaattgatgaatgctgttatcttgggagtgggttagttattaggaggatgggctcctggtaaaagaagaaagctcagccctcttccctttctcactcctacccttgcttgcctttctgctttccttcaagttgtgatgcagcacaaaggccctcaccaggtgctggtgccatgttcttggactttccagcctctagaaccatgagccaaaaaatgtcttaaaaaaataaattacccactctgtggtattctgttatattaaggcaaaatggactaaaacaatagtcaacctccataaggacctactaggctaaatgatggccctgcagagacgtccacgtcctctgatccccagaacctgtgattgtgttaccttacccaggcaatgaaaactttgctgatttaagttaaggatctcaagatggaaaagcttctctgaattacttaagtggggaagatataatcacaatggccctcataggagggaggcaggaggatcagagtccatgaaggagatgagatgatgctgtgtcacttgctggctttgaagatgggggaaggggtcgtgggccaaggaatgtgggcagcccccagaagacaaccagaggtagggaaacagatcttccctagagcctccagaacaagccagccttgcagacacctcgatgtttgactaatgacatggattttggacctctgacctccataactgtaagataatacctgtgtgttgttttaaagtttgagataatttgttactgcagcaatagaaaccaatacaatgtgctgtatatcagtgcttctaaaccataatgtgcaaagaaatcacccaaggtattgttaaaatgcaagttcctgtacagcaagtctaggtggaacctcggagtcatcatttccaacaagtttccagggttgctgaagatgctgctgtgtaagtcatgctttcagaagcagggctttgcacaataatatctcccttaattgtcataacgactatgaagtagcttttaatttccattttacggttgaggaattgagactgagagtttaaataaatggtctaaggccagaaagatagtacatggcaaagcatggcattgaatccagtttaatcagagttcaaaacctgtgttcttgccaccaacatccaaagaacatgaaaaatgtaaatcagggaaaacaaaacagcaacatcatcattttcacgtggacactggcaaactttctcttctctagggtaaaagtggagaaggtttgggatgtgaatagcagtatttgttggtagcagaaggccatgatatgattcacacgttttcctgctctcagagaaatgatcactccattcacacatgaaaagagcctgaggctcagcacttttaacttacctccaacaaaggcaatgcttagtttttaattgtgtgacttcaaagccaaccattgtgtttgagggattaaattagttatagagaacactgaaggttttttttttttttccactctgcaatgttttgcaatgagaccttttggaattcttcttcggattattaagaaacaatagtacgtacatgggaactcttcagctaaaaagccttccttcctttctttctttctttcttcctttctttcttctttctttctttccttccttccttccttccttccttccttccttccttccttgctttctttctttctctctgtctctctctctctttctttctttctctctctctctttctttttgctaccatctcaggggagctttgctcactgtagttttcactacagtcacatcaaaagttccttgaaagtacagctgcattctcatattcacatcatctatacctgggttttccatacatacaattaaacatgagccatcatttgggtttagaacatgcagtaactgtttctccatgtctttgcagtcttcttttggaaacaccaggttgtgaatctctgcatttgacagcagaagttcacagtttaaaccttggatttgtcactttttcactgagtagccatggccatgaggtttcacttctctgagcctcagtatccccagaggtcatacacagaggagctaaggaccggggagatgtaaaagtgctttgaaagctctaaagcaataaagaagtttgagttaaaactccctctagcgttttgtctgcagtaaagtggcatcaaatgtgtttataaaggttgaccttttcgggccgggcgcagtgactcacgcctgtaatcccagcactttgggaggccaaggcgggcagatcacaaggtcagcagatcgagaccatcctggctaatatggtgaaaccccgtctctacttaaaaaaatacaaaagattagctgggcatggtggcgggtgcatgtagtcccagctacttgggaggctgaggcaggagaattgcttgaacctgggaggcggaggttgcagtgagccgatattgcatcactgcactccagcctgggtgacagagtgagactccatctcagaaaaaaaaaaaaaaaaaaaaaaagggttgaccttttcctgcttgagttagtgaagccccatgaacattcctggttctttctctaacaccagcatttcttactaggttctcagagctcctgatatattagtttttcacagtcctgaattgaaggagaagttgagggcagcattccagaggcaaagttaggtcacccagatttgcatccttgcactgatgttttctaaccatgtgatcattaagaaagtaacatgtgctttgagcctgggtgctgccgtccaccttataaagataatatcagtgccaatcttaccaggctatttacatatagtacttaacaccatggctggcaaagatgacagtcagcaagtggtagttaccaatggtggatcacaacaacgctgacttgattaattgaggtctagctttgtttctgcatctctgttcgatagtttcctcatctggtccacactcagcttccctaggaaaatttaaggtctagcatcttctaaaattctctagcacctcatttgcataaaccaagtttaagaattatttgggcaatgggggaagacacaaaacgcttccttatatttctaccttagtagaactgatgatgacaaacaggaaaacaaccttacttatttattaatgcagaacaaataatcaaaacattgaaaaccaaccttacaggaagtttacaaatgtagaaaagaaataaagagtactctggaaacataggaggtgatgtccttgttcctttgtctgaaacaaaaatgtgctgcctgtctgcaattccctattagcaaaccatgtggagagagatgaccaggtgagttctgactattgacttcctcccattccattgaaaagaaaaacatttaggtttttttgttgatattcacgattggactttttatgcacttgaaacctccccaagggggttaaaaccccaccaacattccatgtctaaagcaaacatttgttcttctatgaagggctctcagaggcatgtttattgtcgaggtcaatatctcctgccctgactttcccttgccaaaacacgtttccaaagcatcagatctgacacttcgttgtagcatttgcagtgtgacagtcctgctgctttcacccatggacagctagcttgctagttttattttgcactttgtctttttttttccaatcaataaagttatatgagtagtgtttaagatgctacagtagatactgaggctgccagatagtacatgctaattaatttttaattatggctttaattttatatgatgccatttaattttattagatgtattaaagtgaagctgtcagatcacaggatctactgcttgggccagggtgagaaatgtcccaggggctgcatgcaggtgtgtgacatcattaagaatgtcgtaagtgggtgtctgctgcaatgtgcatattatgcacataaatgtcacatatgcctgagtggatgaagcggcttcctctcaggcaacctgtgaagttctggaaccactttgctcagtgcagttcaaagactgcctgggacactgagctgcaagctgcaagttagatcctgtgttgccaccgactggccttgtggccttggttaaccatggtattttgctttcctgagcctcagattctccatcagtaaactgatcaccttatgcttttgctttttgaaaaaaataaaaagcaatacactagctatgattgttggcattaacctccctgcccctagaaattgaaaggaaagagggagggagggaaagagggagagagggaaggagggaggaaggaaaggaaggggaatgagctctaagggccggtgtcggtggtttgctccatctcttgggattccctcccctcggcttccgtttgctttatcttccagcagcccaaatgctgccttcaggttagggccactttaccttcaagagcagaggctggaagtgtgtttgtgccacatccacaaattcccaggtgtaatttatatagcagagtcctcctcagcatcaggctgcagctgtaacttctgaagcaccatctttgctgggctcctcttctttgagtccactccccgacttcctatggggtcccccacagcatattttcttagtaaattccctgcatacaaatccttgactcaataaatgtggaaaagtgtgcctaagacagggaaaaagaactgggaagacagatcaggtcacaggccaagagaaacattttttatccaaccacagcaggaaaagcagagacattttacaccaagacttcttcattaattgacatgtttgtgtgtgtgagtgtgtagatgtgcatgtgtgtgctgaatgctgaacactgttctcttattgtagcaggctttaaagctcccaacaaaggaatcaagagggatggaatggcattgagataacatccgactgtctgatgaaatggtgctgtcagagggaatctgtattcctgtgcaagaactgcttgcctggatttccaggactggccacaaaaatgctgcatggagtcaaccattaatcaaacagaaaggactcacctgcatagaaaatagaatatggagcttcctatagtgaaacataaatcaattggtcagagcaatggcataaaattgtattgaatgtgcttcaaaatggcagagaaacgtgcaaggttacatactatcttaatttctaccttgcttcatttccatgaggcagaagcaacacactcttcagacgcatggaatttggaaagactactttcaagagatctttgatagtcctctgtgagcatacttatgtctgcctgagagacatccattcaaggcttgttttgctgccttctttttgctgatctcttttgattcagatggatgattcatgctgtctcctccaggaagtccctgatcttctggatagaatgaatgactctcctgccatgtgccctcccactttgattgcatttttctggaggcaccctgtccttacactattgactgggtacatgtgtgtctcttaaaataaaactcttctcaattcatgcgttcatttaactgacagttaccaaggacactgaatggtaaacatgcagacccttcatccagacacactactctgtcagctgtgtgtccacacaccttccaagcatggggttatcagaggtgaacaaggcactgaggttcctgcctggggaaacctactgaggggagaaagtcagtaaatgaaataattcctgtgggtgataagagccacaacagaaatgaaatagtgatgtgataggaagtggctatgaagaatttaactgcttgacaagttcttcctgcccactgcacccacgaaaccattcaccgagactgtggtgttgcagtaaagaaagcttaatagacgtgaggccagccacacggaagagggagttatcacttaaatcagtctccccgaaggcttgtggaggttagagtttctcaaggatagttcagcgagcaggagagggaagggggaatgttggttggttgggaatgaaatcataggggtttgaaaaacagtcctcatgcactgagttctcctatgggtggggccacaggaccagttgagtcatgagtcgagggtctaggtggagtcagttggttgccaaaactacaaaagtatgaaaacgcatctcaaaaggccaaacttgggtcctgcaatagtgatgttatctacaggagcaactgggtaggtcacaaatgtgactttggaaacaatggctggttattgtttgactatgcctatgtcttagcagaattcagtccctcataatcctaatcttgtgggcttttatttttttaaaggtggcttcgttttaagaaaggttattatcatccttgttttaaactatcaactacattctttccatggttagcctggcctatgcccaggaatgagcgaggacaggctgcagatgagaagcaagatggagtcagccatactgtttctctgatggtcatattctttgcagaggtggttacaggaactggggttcaggaacagttcaaggaggggacattttagctgagaatgaggcagccatgagaagggggtgcaggggagagtgagccagggagagggaaaaagaattgaaacttcctggaacaggggaggaacagtatggctgaggcctgggggcagggtgaaagtaaccaggaagtaaggtcaggagggtgggcaggggtcagcctggcaggaccttgtgtccctggggaggagcttagcttgctggtgccaaatgaccaggctggacatcttttttgtgtcctttgcatgatctgtccttgagagatgaccagaaaggtgtgaccaagtacctggatagtttcaagtgctgtaagttaacaggtgaggacagatcagagcgtaggctaccccttcaagctggcaacattcccttgactaaagctttcagcggagacctatgatttccacagtcagaagacacgctagacgaagggcgtccatccagtctcagcccagagtgtatagcctcctcgcaaggctctcactccaggtcacactctccagactcatatcctagcctgaattttttttttccgttgcttcaactcagaagtagcgactgcatcttgctggctcctatgccaggtgtgcagcaaacactaaatcaggaggtgcagactcacatgctgtgtgggaccaggtgagtggcatggacgagcaggacctgagcatctgggaggaagaccctggcagcaggaggaagcttgccgacaactcggacatgtcaacccagcactggcaaaacttctgacttctcatagaagctggaaatccatgtgattacataagttccttggattcgtaaatattgataattagttcacattcttaacactgtgtgtgttgaatatgtctatttgccaaatagtaagaagaacaaacatagtagtaagaaagtgccaggcgttcttggaagcatttccacatatagcaacctaaataaccctgacaactctccgaggaggcaccaagagtgcctggcactttttaataactctgttttcatgttactctgctgttacttagggcataacattttcactagactttctggagaatatagtcaattatgaatgctccaacgctctgcatcactatctagacaaactgaatgccatttcacatgtgcactagtctgcatggagaagtactaaaattttaagcttggacttgtgttcctaatttcctatttctagtgcattaagagatgatgggcattttaattttccaaaagcaatgctagtattcagcggcaacatgctacgtctaccacacagtacagtgaatagcagaactacaaaggtgggaggtgtaagtgaattcctattggaccttcccaataagttgtcttttttgtgccctgggcacttctcttgcctcaccttagcatctcctcttctgtaggaaacaaccctgcaaggtagaaatgattatgctcatttgctgatgagaggatgagctttggagagtggcttagctcacccaaagacacaaaattaggttcccagtcctatgaccctatccactgtacaacccttttgagatgtctttttagacgtttgcaattttggcaaccaactgaccctaccacccacacctcagactcatgactcagctggtcctgtggccccacccagaggtgaactcagtgcatgaggattgtttttcacacccctatgatttcattttcaaccaatcaacattcctccttccctcctctgctcatcgaactagtcttgaaaaactctaacctccacaagccttcagggagactgatttaagtgataactctctcttccatgtggctggcctcatgtctattaagctgtttttactgcaacaccatggtcttggtgaatggtttcgtcagtgcactgggcaggaaaaacttttcaagaagttgtcaaacttaaatagtagcaaatgagtgaataaggaaattccctgctgtcatacacataacctccataacatgtgacctaggacacattttctagatggggaaactgaagtacagagagattaaggaatttgcctcagccattcagtgaggcagtgagatcctgggatttgaggaagctatgtagctctagaagcctgctctttggggctaaactgtctgcaggttcagtgtggacagcctctgcctagagtgcatggcacccgtgtggcaggaaatcagccaaaaaaccagagctgcatgagcctgggccagaagcctcatgagtggagaggggccttggacactcaggtcttctcagggcccagaaagacaggtacatcacacaggcttccctgccagagtctgaactcctcaaagcaaacacctactttctacaattgccagggcagtgccccattcacgtggcatctgtgctgtttcggcaaggcaacatgaggccatcatgagctccatcatgcacctgcagaatgaccttgggttgtacagtggttagggacgtagggctgggaggctaactccaggctctgcgacctttgtgtccttggataaactaagccactctccaaagctcatttcctcattagtaaatgagtataatcatatctaccttgcagggatgttttctggaaggggagatgctaaggtgaggcaagagaggtgcctggggcacaaaaactgacagtagccagccctgcacttgcaggagcctaagagtgagggtctccttacatttcacacccagggcagcactcttgccttacctcagcaggccctgaaagtggtggatgatgcaggtggagggtacttggcatggtgcatggcgcacaatgggaacctgcaaagggcattcccaaccccctgggaagccctgagcctcctgcctcatgaaccaggccagaccgtcatcaggcactgtgagtgcctggagttgatggcagccatggctcctttcacagtgcgctgccggctctggggatgctgtttggctgtgtccttcagcctgaaaaatagctctgagtgataagccctcctgcccgatttcttgcagttgacaaacaatgctgccttgaaaacagctaatttcgaaaggagagaattatacagggatgtgtttcctccctcagagcattctgggaaaagccatggcaccactgcttacctaacaggttgaggcaacagggaatacaggtggggggcttgggggaatggctgtgatcagtgctgccaattcccagctgccgggctgcactccaccccaaactgcacacccagtacgtggtgctgtgccccagagaaagtgcccacataacaccacagacacctttccccatccatttggcccatatctctggagtgtgagctctgcgtcaggcagtgggctaggcgcagaaacagaatggtacggccctcgtccctgggcagctcacagacgagacaggcacttaaatcaaggcagcacatgattcactgctatgagggagagacagacaggtgcgtcacacaggctctcccctgcaagagtctaaactcctcaaagcaaacacctactctctacatctgtgcatgagtaacgagagctgagggcacaatagacggccaacaaaaatctgtcaattaaaaatgcagtgagcaacaatgcaagggactccaaatttagaaaccacaatgcaaacagtcaccagataaagaatcatttataaaaagaacctttacaagtttcaagtacttgagatgtggtccctgtaaatccccaccaccctcacatggtgtttaaaaacaaaagagatactggtggcatccacagccttccagagcctggaaactgggaaataaagttgcccttcctggtggggagtcaaggccatggtgagatttagtgaaaattcatacaaattgtcttgctgtgagacaaggaattagcccttctggggagagctgtgcctccttaagggctttaaaacaaaaacaaaaaactggggtcagaatagtggtagcaaccaagacactctggaggtgactgtggctccaaagcacggcggggagaccagcgggtggggaatgaccttctggctgggttgggtccaagcctgcttatttcctaggactccgtgcaggtcattccagctacgagctttgggcacatttccaaagctgatatctttgtggcggcttgggaaagaggccaggctcttgggcctcctctgccaaaacaaggttgtaaaatgagtctgctggtttcatactgggatgagaagaggagcgtgcaggacgtaaaaaaaaaaaacaaaaaaaaattaaaactctgaagaacgttgaagaattgagcaattacaaacatacgaatggatgcattaggaatgacagtcataattattccctgaatttatacaacctagaccactttgcatttcacacatattatctcattaattctcattttaatagtttaaaattgagtttgtgtgcatgtgagttttcctggaagcttcataaccatggtgggtgattttcacaggaccacggaagcctttgcagaggttttataaagattagtcctaattcatgaagcaaacaaacatcacagagggaaaaacattaacctactgctccctgtccccagaaatccatgttgcccctcggggttcccgcaggctctgcttggacttgccttccccaagaccccaactcccatgccagggctgtgcatctgcttctcacatcctcaggaaccccagcaagacccacgccttgtcatttatttctgagcctctgtggcctagtccaatgctcgttaaatctacacattaataggtaataagtgagtgaacacaaatgtgatgaatgctgtggtgagtgaacactaatgtaatgaatgctgtggtataagtgagtggacactaacattgtgaatgctgtggtgtaacaagaaatctacttgtgatctttttccagttcttgtcttagagctcctaagacccttgaaaatttctgagtgataggtgcatcttttctttttcataatcagcccctttccatgacacctgaatttatgctaatgaaggacttctagggcccctagatcttctcaggatggggctggtccccagataggccaaatgagttgaactctcagccccttgaagacctctgggaaggagtagggggcaggctggaaactaggctctgtaaaaactcttcagcaacaagatttgatgaacttctgggttgctgaacccttggaggtgctgagaggggggcacacccagaaagggcatggaggctccaccccaaaccttaccttgtgactctcctcctctggctgtccatctgtgtccatgatgacatcctttataataaaatggtaaacatgcttccgtgagttctgtgagccatcctagcaaattaagcaaacccaagggagtggtgggaatcccaacttacagctgatgggtcagacgcatagatggcaacttactacttgtaattggtatctgaagtgggggcagccttctgagactgagcccttagactgtgggatctgagtctaactccaggtagaaggagtcagcatagaattaaaatacaggacacccagttggtgtctgctggagaattgctcggtgtgtgggaggacacccatgcatctggccaccgaagtggtctgcattgagtgtgagagtagaggaaaagagaactttgatttttccttgacaaatgcccttgccatattttcttcgttaggcagttttttttacctttgaggtgcttaagccacacagtctcagctagaatgtctcctgagaggactaaccttgtgtcacgctttcccgtctggctctttctgcatttgataaagtgactgacggatgctaggtgctcaataaacatctgttaagttaactctgactttctcgtggttggaacagctatcatcagagcacaccaagagacaggtttaggagcctccatcctcttgtatacgtaagaggatctgagtggaggttccccagaagcagatctggagatgaagatttgagggcaagtagtttatttagatgaaattaggaagaaaagggaaaaccaccagtcaggtgcagctatggagccagccaccaccatgggcgggtggagctgaatcccgtggggaactctgggagggcacacagagttttcccagttgacgggccagcgagctggggtatttctccactggcccctgtaggtcatttttaggctactcctaagggtgctgattctcaatcacttcaaacctggtagcatcctaacagccagagaaaggcttcaggccaaagaacgcaggtcctggctgttggaagtcagagcagagagcaccggaatgaggagtcctgtgggaagacgggaggactctggtggcatctgctacaaccaccctttaactaggacccacgtggtgcatggggcccagaccttgactgtgagtccaggactccacctctgggtaagagctctcaggattttgcctctctctttcctgccccaggacaagcaggggactcctcatctctctctggctccagagcttcatggcaggagtaaaaactgtctgccagggccctgtggtagaaaggggaataccagctcaggatacaggggtcctgcttatgccttagtcctgcctctaatgagctgtatggctggatcaatggctcaccctccctgggtagagactgaaggcagttggtctggttcataagagcccttcctttttgccctggtcctgggcagcagactgtatggttcccctctctggatggccgtctttctccatagatattctgtattatcattattattaatgaggcaaggtcttgctctgttgctcaggctggagtgcagtggtgtgatcacttgaggtcaggagtttgagaccagcctggccaacatggcaaaaccccgtctgtactaaaaatgcaaaaattagccaggcatggtggcacatgcctgtagtcccagctactcgggaggctgaggcaggagaatggcttcatcccagggggcggaggttgcagtgagccaagattatgccactgcactccagcctgggcaataaagtaagactccgttcaaaagcaaattacccagtctcagttatttctttatagcaacaggagaacaaactaatacctttaggttttaagataagctgaaaataaaataactcaagtgggattcaaggtggtctttggaaactaaagacagaaataccactcgacccagcaatcccgccactgggtatatacccaaagggaaatgattcattttatcaaaaagacacatgcattcatgtgttcactgaagcactgttcacaataacaaagacatggaatcaatctatggtaaactggataaagacagtgtgggacatatatgccgtgaaatactatgcagccataaaaaagaatgagattatgtcctctgctgtaacatggatggagatggatgccattatcctaagcgaattaacacagaaacagaaaaccaaatatcacatattttcacttataagtgggagctaaacattgggcccacatggtcataaagatgagagcaacagacactgggaactactagatggggcaggaagagagggggctgaaaaatcatccactgggtactatgctcactatgtgggtgatgggatcatttgtggcgcaaacctcagcatcgtgtagtatacccatgtaacaaacctgcacctgcgccccttaatctaaaataaaagttgaaattctttttcttaaattaaaaattaaataaaatggtctttggcatttggggcctattatattagtttttaataatttttttttgtatccctagtttcttaaaccaaaaaatagagatctatgtgctggttgccaaaatactgttaaacacaaggataaaccaatttaaaggaacatttaaccacttaaagccagaaaccgtcctagattaaaacagcaggaggaagggaaatctgatctgcatacttaagtgaggggccttgacctgccctttctaaagcaccacttccccctgtccccaccacacctcactctcagggactttttcctacaattatttggtggcctcctctctcttcatgaaatgctccctcccttaatatctcaggtcctggctcgggtaacagcttgtcagtgaagcgtttcctgacaagtgcatataaaacacacacacacacacgcatgcactcacaggcgctcactcacacatgcactctctcacacatacacactcaacacacacagatacatgcacactcacacacacatacacactcaacacagtcatacacagaaatgcacaagcacacacacacgcacactgtctctctctctcacacacacacttacacacgtgcactgcgttccctgcctgcgtcatggttttccatggtctttgtttggttcctctccccgcaggctacacactccatatggcccagtctcaggaatccagaacactccggcacccaaagatgatctttattattgttgctggagaatgggtgtctcaagccaggagacggggactcactcttttctctatggggaaccctggaaccctggaaacacaccattctctgtgaggggaggtatggggacctgcccttttctgtgagggggaccccaaggacacgacctcctctatgtaggaagccctgagaactcactattatcagtgaggggaaccctggggacaagccctgttctgtgaggtaagacctgtggacctgctctttactgtgaggggaaccactgggacctgcccttctctgtgaaggcagtctcagagacccaaacttttctgtgatgggagccctagggacctgacctcctccgtgaaggaagccctaaggacacgccctttactgtgaggggaaccctggggacctgcccttctctgtgaggggagcccccagatcggccttctttagtaagggaagccctagggatccaccatcctctgtgaggggaattgaaacctgccctcatctgtgagggaaactctgaggacctgccctcctctatcaggggagccctgaggacccacgcttttgtctaaggggaaccccaaagactcgacctcttctgtgaagaaaggatccaccattttcagtgaggggaaccctggagaccagccctcttctgtgaggaaggacctggggacccaccctttactgggaaaagaaccctgaggacccacctgcctctgtcaggggagccctggggacctgctctacgttgtgagtggaaccctgagaacccaccctcctctgtgatgggagccgtggggacccaccagtttctgtgaggggaaccccaaggacctgacctcctctgtgaagaatccctaaggacccaccattttctgtgagagggaccccagggacaagctctcttttgtgaggaaagacctggagacccacccttttctctgagggaaaccctggggaccctccctgcttgtgtgaggaaccccagaagttcaccctcctctgtgaggggagccctgggtacccgcccttctctgtcaggggctcctagggacctgctgtcctctgtgagggaaaccccaggacctgtccttttctgttaagggaaccccgaggacccaccttttctgtgaagggaaccccgaggacccgccctcctctgtgaggggagccccgatgacccgcccttttctgtgaagggaacttgggaacacgccctcatctgtgattgcctctgcctggcaatgagcttctatagaagggcaactcctctttgcccttcctcatgacgtggccctcctggtgaggagccttttttaggatttaccctggtcttctgcatggccctttctatcttgtccttcccctgggcagcccctcctcagtgactcgatgtcccccttgaactttcctgtcagagtctgcaggggtcacagaaggggtggacgctatcctgcctaaggccaggaccatgaccctcgagtccaggagtcttacggctgacagtggggtcaagcaggggaggcgggggagcacctgaggcttggaccttcccttcatggagttgttaaaactgcatggggacttcaggtgacaaatccaggaagcagcaaccgtcattcagagccagcagttggcacgctaaagaaatctaaagaaatcctggggtctctgggtggtctggtatggattacctctgaagccccgctctttctgtgttggtcctgtttaaacctccacactgaaactcgtttttgctctgaccattatcaatatggaacacaggtgtgggctgagctgggcgggttgatgagagctgaggggaggacatgctgacattagaaaagtctctgagattagaacaagcccctggtccaccaggaaaggaaacagcaatgccagaaaggcaggagaatctggattcggagaggacctatgtcagtttctagatctggatttggggaggacctatgccaatttccaggtggacataatgaaaactgcagggtccgcttctacatccctggtgttggatctccacaaaacctagaacagtggcctggaacactgggatggttgtagtccctcagagtttaggctggccggaactgcacacacaaaattgtcaatcgtcactcccaactcaggactggcaggcacaacagtctccattgcccaggacagtgcagacaccacagtcccacacagcccaggacagtgcatacgccacagttccccatggcccaggacggtgccgacaccacagtcccacgaggcccaggacggtgcggatgccacagtcccacacggcccagatggtgcacacatacccttcccttattctccaggaatgggcagaccccacagcacctcacagtccaggcctatgcacacgctacattccccacagcccaggtctgtgcagatgctgcctcccctcatagctaggaccaggcagacgtgggagtacctcgcactttatgagtgggcagacattgtagtgtcttccaactcaagactagggccagagggataaggaagtggctgaaagaggccttgtgatcagaactgcgagcattcagagtgtgtacataatggctgaagatcagtcagaaccccgtagctctgcagatgtcagtgtggacagaggatgcccaaaggataaatttttttcttcccaagactaatatttaaaagtcacatgagtcttgcaaaattaaataacactctaggaaaaatttctggattcattgtatctggaattaattatgatgatcatttttgcaaagattgttatagaaaaaatagatttttatccttgtgcacatttggattttaagaaattagaagagccagtcttcaacatcgtcctgggctccataatccccttgcatccatgttggaagttcccactgggagcacacggggaagggtgccctgaatgtgcctttctgccacctgctctggggactgtccccattgccagggaactttgggttctttacccctccataggcaaaggagaaccttacacagaaatcagccttctgtcctcacacagtagcctcatcacagggcttccaggggccctcaggcaggtgggtgctgaagtttccccctagatgatcagcagcctgcttccacccgaaatccagtccccctggctgcctgtgacaagagagcccttcatgctgagtgctgctctcatcgcacctttttctctccgtgtttagacagagagagtggattcatgtttgattaaacagtgtgggcccaggaaaatcaattagcaagcaaagtgatccacagtaatcaggatcagtgccatctactaagctcccacgatgtgcgaggtcccatataagggcctcactgtatcatctcccttaatcttaatgagatgagatagatagtattatctttctcactttaccaatgagtgagagggcagagagaggttaatgcagaattgctaagtatctgatcaggatttgaaagcaggggtttgcaattctgtagaccttgcactacacttgtggggcagagccaggcatccctcacatcttggtgacctcagggagttgccaggattggagtccaagacccacccttgttggggttggggggcagcttgtgagcagcctggaatgagccccatgattgatcgctgcaccttccttcccacaagtgggtaatttggtctccttctttgttgcagtttttgcttttgttttttaatttgaaataacaccatccagttggcaaagcctgtggggagaaccattttattactttttctaaatataacgggaaaaagttgctgacccagagctctgtggcaggaacaaattgtgcaagttctgttaagaagaggatagatgtgcacctgggactgcagagaggggctcccaggatgggcttctgccagaggctgatgtccacattgtgttctcttccaacgcaatcatcacgttagacgaagcatgagaatttttcatcagctgtgtttaaacttgatgatgctacttgcaaaggaggggctttgagtcccaactcaagtcatacttcctctgggaagcattcctggagtttcatctgcccaagcaccagcattctgcattcagaggttcagtatacactgtctcacactggcgctgtctttagtatctaactgtctctccaggttgttttcctgggaggcagaaactggctctcaccttcttttgcccacactgtcagcacctagaagtgcctggcatgtttcagccctcagcagtcacttgtttggtaacagtcacctgaatgtcaaatcttgctctgtaaatgagaacagtaatacatatacaccctttagggctgttgggaggacgagggacaaagcataaaaagcatttatcactttgcctgtatgtagtaggcaattaattagtgttgactattataatgtgtttcagaaatgaatagctgcaaacagagctcaagttgtcatccctgtgggagtgggattatgtctcctggaactctatggaggtcagtctcctgtgtcatcatttaactttcttatcgatctgaatccacccgccgatgagaccttctggtgatgctgccctggaaggtgtaattaaaattaaagcaaaaccaaagaaatacattagaaaggagagaagcaagggctgggagtgacagggaggcaggttggaaatgcaaacgaggctgtgctaaaatagtctccacggctgggagaaggaagaaaccatccagaatctaagggttttctaagaaacggtaatggcaatgaggagggccgctggggaggactcacagatctaggtgaaccaggtctgtcgggagcatttgccgtgtctagtggcccaactcactcatagtatagaaggcaggagggggtggaagagatggaggggatggcaggagatcccagaagaggtgagtgtgttgtgtttttctatcttcaaggtcaaacatatggtctcccagaaaaccaacaccaactccaagcttagtccacacgctccaggtaggctctggggccctctggttcaaggcgcctggagcaatcagcccttcagatacccctggagatggtgattacttcatggcacatcttgtaacccaagccggtcccatgagaatgtccccaggatgagcacaggtgctactgagagcaatgactttttcccagtggactggatgctggggggatggggagatggtgcctttttaaatcctttatccaaaagctgaagcccgagacctaggctgggaagccgggtcaagagatagacatgaagctccagtgacttttttttctgagtccctggatcaaaccacacctgaaagtcacatatgtgtttggttttctagttttatgaagcagtaaatctgctttgttcttgaccagtttgtggtgaatttactttggacactaagcgttctgaggccccaggccccaggagggatacagtagattggttcacccgacatctgttctagtcctttctagtgggtgttcctttactgcaggggtgggggaagcaaaactccaactccaaggcccctcccagctagggctctgtatctgattgaggttccaccaaccaggtgtcctatgagacttgacttgcggccaagttgcatgaaagaggggaggcagccgtttcgctggtgtgtttgcagcaggtgcagaggcgctgcttgatccccgtatcactgccaagctggtggaacctggagctagtgcttaggataagacatgacgattcacctcctgtgtgattatagcaaaagcagcatgcagttttccggatgggccagttctgcggtgaggtcctgggtcccagtcctacagagcctgcccctgcaggccttccaggggttttggaagcgcctcatttccagtattcgcccccttttcttgaaatagctggagtggtttctgattcctgcatcagtatcctgactgatacagcagcaattctgcctttggacacggtgtttgctttccgtagtcaggcgttagcacgtcaggctcccccgaccttgggcgtcttactgcctccaggtggcaggaggctagtgactgctccctgaacccccagaagtatagatggaccatatttgtgatgtggttcccagctgacccagatttggagtggaggaaggagagatgaggaatggaggtgggtgcaaaaggataaattgactgaacttgaaaagagaaaatgctgccattagcatgggccattctccccgtgtgcctcctcggggtttgtgaagaacaggaattaagtcgttctgagcagcctccacagagttatcctaaaggcagatatacccggggttctttggccatggtgcatgcctgtcccactccagaggaggaagacagcaggctggaggtgggtttgggttgtttctcaggaatcacaatttgggatccctggtacaaagccaacttccttacgatttcacactgagtgattggcaccacccatgcccatatcaaacagctaaaaacacagccccaggtatgttccagctttctgggtcttctcagatatatgggttgttcctgagatcaaggacagggcactgtgttctctcagtgtagttgggcccctatatttgacacttcttttacatttgatttcaagctccaaataaaatcccctacatataaaggttctgcagattcactgactggatgccctcttgacttcctgctagcgtgccttactgtacagtaggacaatggtctctgagagtgggctttgaaacagcaggctcagcatcaccacggaacttgttaaaaatgcaaatataggctgggcgcggtggctcacacctgtaatcccagcactttgggaggctgaggtgggcagatcacaaggtcaggagatcgagaccatcctcactaacatggtgaaactccatctctactaaaaatacaaaaaaaattaggcaggcatggtggtgagcacctgtagtcccagctacttgggaggctgaggcaggagactggcgtgaacccgggaggcagagcttgcagtgagccaagattgcaccactgcactccagcctggctgacagagcaagactccgtctcaaaaaataaaataaaataaaataaaaataaataaataaataagcaaacatatggccaggtgtggtggcttattcctgtaatcccagcactttggaaggtcgaggcaggtgggccatttgaggccagaagtttgagaccagcctgggcaacatggaaaattcccatctctacacaaaaatttaaaaataagccgggtgtggtggtgggcacctgcagtcccaactcctcgggagaatcacttgagcctgggaggcagaggttgcagtgagccgagatcatgccactgcactctagcctgggtgacaaagtgagaccttgtctcaaaaaaaaaaaaaaaagaaaagaaaagaacacaagcctcaccccaaaccttatgaaatgttagctttctcacagggttattgcagtgattaaattgaaacaagatgtgtaacacatctagccaagaatctgcagttacagggctgacactctttgggtctgtgtgtaagggtgcatgtgtgtgtgtatgtacgtgtgtgtgtgcatgtatttgcacacgtgggttagtgtctgtgtgtgtgtatgtgtgtgcatgcgtgtgtatttgtgtgtgcacttatgtatgtgtgtgtatttaggtcactgcgcacaccctcagctctgtctgcgatggctctctttgtccatgatggacctgtattcatctttcagagttttactcaagcatcctttggtctatttgcctgtgagctcttgtcttgtcttactccccccgcttgtactagcccctctcccagagcttcctccctatccacattccttgtttgcatgagtagagtaatccctgtggctagtctgggacccattcacccttctcctgctcatggcatcctggttttattttgggaaattttgtgccacccagtcctaatccgtgtggtgtggtgggattgatcctacagcatattgtctgggctgaccaatcttattctacttcaaggccacagtgattgattcacaagtgagcacgggacatacgtgggtccaaggcgggtaggtctctagatctgggcttgaaatattggcccatttttggttgggatgggagaaatcctgcccaagcacaaagccaactttgagtaaagcagaaggaggcaatggagaccaactcccggctctgaatgcctgaatctgtcagtgaccaccttttagaccctgtgagtgtgtagctgtgtgaattaaccaagacctctttttgtaaattttaggggattttgttcttgtgttgttttcccaagtcactgtgattgtggttttttccccttgaaaaagaacgagttgggtttcgtgaccctgttaagggacctggtcttacaaatgcctggttcctgcaaagtcctcggtctatggtagacccccaggaagtgctgaatgatggaatgaatgtctaccaaaagagaagggctgagatcttttccttcagccttttcttcacctcttcagcatgcattcatgcggcactgcccatgctccaggcttctctccactgtgcaatttgcctggctgacaaattcccctgaccacctcaacctgcacagtatctgtgagatctcaggggatgagcagaaatgtctgcacccaaaggccaagtaaggcccctccacaaccctctgggctgaaagttgttgagttcagatggctgtgccatgcagctgtctgctaaccatgccccatagagtggagcagacacttgtaaaaacgtccctctgaaactggctctgtatggccccagcaggaattaatttgctattgtaaatgagattaaccagcctgtcttccaaaactcatttgtccatcagatggtgaggtgactggtggccaacctactgggggatgttttggagaggggggagctctccacagaaaacggccttctctgcccttaacttctttttgaattaggattcctcttccacacagcaaatgttggctcaagcttttgggcagctgcaggactgcagttagttaggggtaggaggcccacctgggatgggcttctggcagctctctgaagggtggagaacatgacctggatgttcctgcctgaggaaggaaccatggccacagactgggccctttttcctgctgctggtcaggggacttagaagccctccccgagtctctggaaatcttggatctgaactccaggctctgggcttctaagccgtgcctcccgctcccctgtcacctggtgaggaatatgggatgagggagaagacagggtgaggctggcacaacggggagagggtcggaggaaaggatgccagtgatgtgcttcagaccttttctaaaaccacaggttgaattgttgatttctggtcaggtgtggtggctcaagtctataattctagcattttgataggccaaggagggaggatcacttgaaatcaagagtttgagaccaacctaggcaacatggtgagacccaatctctatttaacaataaaaataaaaataaaaaactaaagtgttaatttccaaagccatgtgtctgtctccttagaaaacctctcaaactcactggagcaaacagcacctgtagactcagcgcgggagcgcctcttccctctacagctccacagacatcactgcactcccagcagcacaggcaggagcctgcaccaggaaaagctcagggatgtgctggcccactcctctcctctgacccttgaggacccaggtctaggggggattaagaaatatgccataggaaaaataaatgcaagagctgaatggaactagaatctctgtcgctggactcctagctcagtccctttcaagctgttatttaggattatcatcggactgccctgggcctccaattttcaggagtttttcaccccacccagagttttaaggcactcattgtgaattacacaaatcatggatgtagccctgctagcgctaagcaataagttgtcctgcatcgccccctggtgggcttttgagctatagtcatattaaatatattaaatttctaggaaggactgaagtggctggaccctacctctgtgataccttaattcctccaagactgtaagacggtcggctccatccacgcactccctctctcccacctgtgtggagcgcccttctcttttctcaaactggatttgattattatcccaatcctagttgcctttctcaggcactcagttctctttcactgaagctctcagcagagtgtggatctaggtgcactgtgcttctattggtttccaccttagctgggctgccttctggaaacaagaacttggctgttttaaaaaaatacatatatatatatatatatatatatatatatatatatatacacacacacatacacacatatacatatacatacatacatatatatatacatatatatatacatatacatacatacacacacatatatacaagcatgcggtgtataataatcccatcagggtaagtggggtgtccatcacctcaagcatttacctttcattgtgttataagcaaaatactcttagttattttgaaatgtacaataaatgattgttaactgtagtcaccctgttgtgctatcaaatactagattttattccttctatgtttttatacccattaaccatgcacactctcccctcccccaacccttcccagcccctgtaaccatccttctgctctctatctctgtgaattcaattgttttacatttttagccccaacaaataagtgagagcaggcaaagtttatctttctgtgcctggcttatttcactcaacataatgacctccagttccatccatgtggttgcaaatgacagaatctcattctttttaatggctgagtagtaagcactccattgtgtacatggaccacatgttttttatccattcatctgttggtggacaggttgtttccaagtctgggctattgtgaacagtgctgcaataaaaataggagtgcagagatctcatcaatagcctgattttctttctttggggtctatgcccagcagtgggattgctggatcacatggtagctctatttttagctttttgaggaacctccaaactgttctccatactggttgtaagtttgttgttttaaccttatcactggatacttagcactgggcacagtgctagggcgtagataagacactcaaatatttcttcaagggagggagcaaggaagacaaggaggccagaacacttgccttggacatccttgaaccctcaccacacatgatgtacagcctggaagaatagcattaaatcatggatggacaagcagatggatgaagaaatgactttctcctggggctccctcctgtcaaactcccacttctaatctccagtggcacaggcccctgtcctgccctagcgcctgtccaggtctaaagtggcaatcctgggaccccattgcctgcagtttcctgatgtgttttttgcatatatttttaaagacaacggaacccagagattgggtatcctattttttggtttaaaactgtcagagatgtttgaaccagagtgactccatcttgaataggggctggataaaaatggaaactgagatccgctggcctgttcccgggaggtcaggcattcttagccacatgaggtttatggttaaaggaatagttgaattcatgttgaccaaacagacccaagacttaaccgacccaggaaatgtcctaatgtcccgatatcttaagaacaaaagcattcttagtttaagaataagtttcgctttaaagatgcagattcttgtgaagatggtagttacacaaagattagcactcctttgacacagccctggtagtggagcacatcccccacagcttttgctttgttattctatatataatcaagcatttcagctaagatggatgcgttcctcctcttgcctttgggagcgccctgctgtgtctacgaagtagcccttgctttattcctatactttcttaataaactggcttttgctttactctgtggacttgcccccatttttttcttgtgcaagatccaagagccctctcttggggtctggattgaaacccctttccagtaacaaaaccacagtggccctgattttcttagagagagttcctgagagttcataagaaaagatttgagttctgattgtatccagatcaaccagcctgacctggacatgttgacaattgtcggtgccattacaggaaagtctccatccaggagaggtgggggacagggccggtgcccatttgccttctaagcaaatgcgtcagagactgttctaatagggaaagaaagtataactaatgaaattaaattcagggaaagaagatgagctctactaatgattaatgttcaacttaatagatcagcaagacatgctgagttgagaagctgcccagagggttccagcccactgcccaagcacaggaggaacaatgagaggagcgacttccgctccccgcacccgcggcttgtctctggggaaacacagttattaattgctctaaaatgtcagtcactttgcttcaaagtagccacttccccggctgctttctgatctcccccttgaaaatgacttccagtgtggacattgactctagcttgtgtttaaaacagaatttggggctgggcttagtggcttatgcctgtaatcccagcactttggaaggccaaggtggccgggtcacctgaggtcaggagttcgagaccagcctggccaacatggtaaaacctcatctctactaaaaatacaaaaattagctggacatggtagtaagcacctgtaatcccagctactcaggaggctgaggcagaagaatcggttgaacccagcaggtggaggtggcaatgaaccaagatcacgccactgcactccagcctgggtgacagagcgagactctgtctcaagaaacgaatttgggggctacctaacctatcaatgcactaggcttttacatctttttttcttttaaagacaagagtcccactctgtggcccagactggagtgcagtggtgcaatcatgactcaccacagcctccatttcttggactcaagtgatcctcctgcctcagcctcccaagtagctgggaccacaggcccaacaccatgcctacctgaaacaagctttttacaaagtgacaaatcagctcagttcaatacatgtgggtgggatcctgctgttctgctgccctgcccctgtggctgcaacctcagaaggcaaatacccacagggaacagacgcgcccagaacagtgtgaggcagggtccgcgggggcttccaaagaagaagacagagagctagaaggggcctcagctgaggcagtgcccgtgggccaatggtggccgcactgtcttcctggagggacaggccctgggctcagagcaatgtgccagctggggctgggattttctactctctcttttccaggcaccagtggcagataggaaaggaccactcccccagggttcccctttgggacacatggcctccttccctctccatcccttcctcctggggtttcatggagccccgactgtgtgctgggccctgcggcagctaaggtcaccaggctccaggccctgctcttgcaagagatccagacaagctgcctgggaagtgaacagtgggaagccacacaccaggagaactggagcaggcaggcgtcacggtgcggtgtggggaggggtggacatctgtatgacaacaaaatcctccctctgttttgaatctcgctgtattgaactctgcagtctttaaaataatgtaatctctaggactctgcagcttcccaaatcctattgacctgtgatttggataagaactgatctcatttgtgtctgaatgaatgaatgttgtctgtgcaagcagctgacttcagggctaggctggtctccagcatcataagagcaaaggcatgctttgtggttacagattggcactggagcggccctccctccctctcttttggggacctcgagggtccaggggcgaggggagccgtgccagcagcctgcctcagtgtgtgttctctgagcacctcgtgaccttgctgggagtgtgtctgatcagccgcttcccttgtgaccaaatatttggtcatggcagcaggagagaattccatcagtggacagctctatttttaaggctctggctttgttttctctttcctgagaggcagtccctgcagcaggcttgagcctctctcactgacagcctgcctcgcataatgttaagcaggcatcggacacttgctggaaggcagggaattgcaatgaaagagcacggaggtgagaagctgtgctccttggggtgaaggcagcttctgtgctcctgggatctactgttaagccagggtgacgccagcttgcatgctaccggaggggtaagtgtgtgtgtttgcgtgtgtgtgcacgcatattctaagatgacagcatcctgtctgcctatcactgcctgaagcacccctttctccaaccccactaatcagctcattcgctcaccttcccctatgaatgtatctctttgcccacccctttgcctgggacaacctgtcaatttccagccctcctctctttccttctcttttctgcaaaacctcgtgggatgccacatgagtctgttttgtgttgccataaagaaatatctgagactgggcaatttatcaaaaaaatgtataattggccatggttctgcagggtgtacagtaagcgtggtgccctcatctgcttctggggaggcctcaggaagcttttactcatggcagaagggaagtaaagccggcatctcacagagcgaaacagggagcaagagaggtgcctggctcttttattttattatttattgtattttttgtgtgattatttttaacttttattttaggatcaagggcacatgtgcaagttagttatataggtaaactgtgtgtcatggaggttcgatgtacagattatttcagataatgggcatagtactctgtagacatttttcctgatcctctctctcctcccaccttccaccctcaagcaggcctcggtgtctgttgttcccctctttgtgcccattggttcttatcatttagctcccatttataaagaagaacatgcgggacttggttttctatttctgcattaattcacattggataaaggcctccagctccatccatgttcctgcaaaagacatgatctcattttttatggctgcataatattctatggtgcatatgtaccacattttctttattcagtctactgttgatgggcacctgggttgattccatgtctttgctgttgtgaatagtgctgcagtgaacatatgtgtgcatttgtctttatggtagagtgatttattttcctttgggaattacccagtaatgggatttctgggtcaaatggtaattctgtttaagttctttgaggaattgtcacactgctttccacaatggctgagttaggtcaccctcccaccaacagtgtacaggaattcccttttccacgcaaccttgcgccaggctcttttaaaccaccagctcttacatgaactcattgctgcagggagggcaccacgccattcatgaaggatccacccctatgacacaaacacctcccaccaggccccacctccaacactgggatcaaatttcaacatgagatttggaaaggacaaatatccaaacacatcaagcaccctctaatctagtagctcaatctcagctctcctgcgagctggccctgtggtttttgcacatgcgcttcgtcagtcgagggatcctttctcctttgtgacaatgtgacctctcataggggacatgctgcctgtccagagccccatcagaggcttagctgctcttgctatccaatctctccagggacatcgcaaccctcctcttgcacacccgccgctcatgccctgagtgatagatggtgttgtgtgggctgtgctcctgttacgcacctgccatttgtgccctcaggaataggtggcgttgtgtaggcagtgctcctggtttctgctggagaataactggtccattttgaccttctccaaccccacagtttttacctctcttggactggtgcaggggagcatggctggaggccagccaagtagacattaattcttggtctgtccaacccttgggaaatgctcctttcagcagcgcctccaggagaatgtcccctaattcatagggtcccaccctttaggctttcttactacctactcctggacacaatggctgatccacacgtgagcactggagccatttgggacaatcatggaatcacccggggattttttgaatggagttgatggtgaaatatacagtctctgtgctatcaataaatatcctcctgttctggccggagtcatcctgggagaatggggctgtcatgcggggaggcagatagtgggctcctggtgatacctgaaccttgagcccttctccactgccatttgcttctgtcggcacatccacgtccctcttgaaccacagcaaccaggaggaggccaggcaaagaccctgagagggaggtgaagtggggcacagttgaaaaaacaacacgatttggtaacacacttcaacattgatcccaagggaaggtggattttaaaaaaacatataagaacaagacctttgccactgctcttgtagaagtggaagaacaggacagtggggccaagtgagaggccacctaatccatgggtagtgcctgcgaggcgtctgcaacattgacctggggctctccccactgtgggtgtgtttcctgtgagttcaagggttagtggaaaagaaaacagcaaagcaaggtcatgttaactggaaaatgtgattatcttcaaagaggtaagacaccgtgtgggcttctccagctcacctccaaagaagacacattcattcagatttgcctggatccccaaaagccccctttttgtaaaggtcaacaggaagaaaagtctctgatgcaccttagttctggattcaaaaatatttctgacatttgggctacatggcacgtctggatgtttttctactttctcagccttcctggatcgaaatcaagcttctcacctttaaagatccaaatatctaaccttcacctgccaatggtaatagggcgttttcagggtctaaaataaaaacaaacaaacaaaccctaaaagtaagcaagataaaggcagtagcagggacaccctacaatcattgtgcaggcgcagtcacaaagcagaggcccctgttgggtccagtcccacggcattgcaaagtgaccccaaagtggcaagtctcgattgattcaaagtttccctggccaggctgagggtgcacccaggcagaagaaacagaagtcccagcaggatctgtggcctgtgttttttctaaagagggttccaggagcttcagtatttaaaggggaaagatcaagtgggaggggaagaggaaatgaaaaaaaaggaaggaaggtaggcaatgagggcagtgttaccttcttgaaaagcccggatctgtgctcagtgaacattcatttcacatgcgaaaaggaaggcaaagggtagggggtgggcagttaatgatgcttttgtctgatgcccggtaaatctacattttacataagcaagcatgtgaaatgacagctatctgggaacaaaaggatggcagtttttgcatgactgggttcccaagctttaccttccctttggcatggtgagtttcaggtcctgagattcggtttttcttttacagcattagaaaaagaagatggatttcaatgtatttagacaaggcaagctggtctaattccacccacactacacttctctctgctgtcttggtctagtagctacactcagcaacatttccttttggctcgtgcaagtacttaaacattaaagtatcaaaaatttaaatacaaatgtcaaatattcacttgaacataaattaatatctgaatatctagaggtggacgtagggtgtagggttaaggggaattctactgtattctcatatccctggtcaccttcaaagttcattccaagtaatttacttatttatttgtttatttatttatttatctttgagacaaagtctcactctgtcacctaggctggagtgtaatggcgcgatctcggctcactgcaacctctgcttcctgggttcaagtgattcttgtgctcagcctcccaagtagctgggattacaggtgcgcaccactatgccgagccaattttttgtatttaaatagagatgagcttttgccatattggccaggctggtctcgaactcctggtctcaagtgatccacccgcctcggcctcccaaagtgctgggattacaggtgtgagccacttaatgtaatttaaatagtagtttctataatactaattcatgagaacaaccccattttactgatgggaaaaccgaggccctgagatctgagatgctgaagctatcaggctacaagtggtgatctgactcctataacagtgctccttgctcatttaaaaacatgataggcaccttttctgtgaagagggtggaaaattgcttcaaaagggctttgaaatgtgctacgtaaagtgccttggagaaaaggccgctagaatacaatgtgaaatgcagtgaattttgtattttaattgactcgaaggctcacacttgtcaaggtggggaaatagcaagtcaatgactgtactgcacacagaaattacacaacttctgaaaacaaattgtgttcctctaatggattttacctatgaattaaaaattgaaaattcaattttctctttggccagctgtgagcttttgcctgataggaactgagttccagctcacacagaaccccaaggctccctcaggaccctgggcaaagtccggctcgcagaggaaccctggctcccttaggaccctcacacaggacccctggctccctcaggaccctgggcagagttccggctcacacacgacgcccctgctccctcaggaccctgggcagagtcccggctcacacaggacccgcctgctccctcaggaccctgggcagagtcccggctcacacaggacccctggctccctcaggacactgggcagagtcccggctcacacaggacccctggctccctcaggacactgggcagagtcccagctcacataggacccctggctccttcaggacactgggcacagagtcccagctcacgcaagacccccgtctccctcacacccgctgactgatgaattcctgtgtgttttgtatccgtgacccaaatcaggtaaaagctgcatagagaaatgggaggcggtgggcacaaggatcgtgcgacgccccgctgtgggtgtgggacctgcagcctcaggggcatgcgggctggcagccactgtctccatgccgggtacgtagatactgccatcaccttggggtcagcatctagggccctattggagctcacactcagctctactgggcatcagattctgtctgggatgcacggcgggaattagagacatgggttggaagtggggctcagagatcagagacaaatgtggccaactgaaaatcaggctgggctccagctccggctgcagatgggtggaaaagtcagaggtgcagcagctgctccccagccgcgaacggctggtgaaatgggaatctgatggaaagaggctgcacggtgctcacctgagtggccaggcctccaggcccggcgagggggactctgaggtgagcaggtcggaggtgctcctggttttcccatcagccctggtcagtgtctgggggatgcccaggagaagcagcagaagccctgggtccctgctacccatggagtctagagggccgagcctttgccctgggatcggggagccagggcatcacagacacctcctgcctcatgctgtccctgcgccccggggcatcactcagagactcctccatggcaagggcgctctgtctggtgccagccaggagccaggggaagattcgattaggagactatgggtgccttcgcaggctttcaggaaactctgatggactcatgaggcctctctttcctggtagtggctcaggggtgctgcagtgtgtggctggtgtgctccacgtctgtcttgtcttccaaggggactccctggatcagagttaggcagggacaggcgacctgtttctgggatctccaatcactgccactggaatctaaggggactcacccaaacccacccacagggcaagcagctctcctcgcaaatcaatgatgttccaaatgagtttttccagcagagcacacagagacccctcttcaataactgcttaatatctgtaataggtcttattagtgttttctaagatagagtcctgttgagaaggccggctgagctcccgtgtgtctggcatctggctcggcagaagggatttccatgtctgcttgcaggctggggcccagtctggctctggatggaatgctggccttgcacaaaggaagggagctacagaaggcaggattcagaggctgagtcccccagggatggaggacacaagatgtggaatgcaggtgtcctgtgagcaggggcagggagcacggaagagggcagtctcaggctgtgcagaaggaaaggcagcagcagctgccccggccctctaggcttcctgggtgaaacccttggctttacaaagacccatctcttgaggggcatttggggtgaggcaggatggagaggccctggagtaatgatgtcagggcatgtgaaggaagagaagaagtggttctctgtgctgggttttggcagagaagacttggaaaggatttgagttaatacattttaaacaatgagttttcaaaggttgttccaggcagtctctgtagatgcctctcacgggaggaagacatctccaaccacatttcaggagccagccctgcagctttatccatgccaacagctgaaaacagcgccaggcagcaaatgtgcaaagaagcgtgtggagatgccatggggattcaggccttcagccttgccctccaggagatgaccacattggaaagttctgctccaccgagcttttgtaggcgttgtcagagagcagagcggttccacaccctgcattgcaacggaggcttaatgcagtggctgtgactgttccctccactggggagttcagcgcagagctccccgctgcaaggatctgtctctaagcacctgcctccccggaacaagtcatcacgacaaccaagagagcttgcaaccgagactacacagccctcatccttgtaaggaaaaaaagtgacaggtattaaatagtggctatttgaggaaataataataaatatctttggcagagtaaggctgatggctgcttgagtctcaatggctgagactctgtcagccttcccattatgaaacccatttttcagggtttataacttgaaagtaaaaatgtgctccaagcagaagaaacctggcacacgaggtctttgaccagaaagagggacctgaacagattagttcagatcaatttgagattgtaaagaaaatctgtcctgagtgtgcacatgggtctggcactgggacgaatcacccaattttggttgcaagcaagttaacggtaggggaatgttcatggaaatcttgcccagaaagtacctgcctgatgtttaactggaagtgcctataggtgggtcaaattctgggcaaagagcattggcccagtggctgctggagagtagaggagggggcacctttgcccctagaaagagctcagataggatctgaggctctaggaactgtgcccggtttcctgacctttctgagggaatccatcgaacctggcatctaaaggccattcagtgctgactgtcctctcgatgtcataagtcagattcctgcttctaggtcatccaggtcccaaaagaattactttgcctaataaatgagtacccaaatggggaaccctggttctccatcatcagatgcctccactccatttcccaaagcccttgacaaacaaggtaactggattcctgtccaaatgcaatgttcaaggtctagaaaataatcaaatgaaatgaaatatcctgttcaacactgaacagcctttagaccgtcagtattgctaatagctcgtggtgtcttcctgatagaactgtggattcagcagtgggcacgcatgccatttgcatcgattgtttgtcattagagggtggagataagtgagctgtggcagcactcatgctttctgggaattctcagttccagggcacgtggtccaaactcttagctgggtttggttgggaacctccacagttgaagcatcttatggaccagcttagcagtttaaaaacattcttctattttattttattttattatttttgtattttttagtaagtagggatgggctttaccatgttggccaggctagtctcgaactactgactttaagtgatctgcctgccttgggctcccaaagtgctgggattataggcgtgagccactgtacccggcctaaaagcattctattttttttcctgtgggaaatttggaaagtatagaaaaaaaacaggtaggaaaaattaaatacccaggctgcatcatctgtccataatctgtagctagccagtgataacatttttaaactccatccaatcacttctcagtgatacagagcaatatgctttacaaaagtgagattctattgcatgttttttacattctgatttatgtacttagcattgtattaggtgcatttttctgcctccatagatattcttagaaaaataccatttaaaaattaactccataatcttcccttgtatggattttaaatattctatttatggacgtattgttgttcttattttttgctattacaaaaaatgccttgatgggcacctttacacataaatacttttatgcttctgattatttctttaaaatgcactcctggaggctcctaaaaatgactgcatcaaataatgaacgtattacaagttgttctgatacaaagtaagacaccagccccaccacatacagtataaaatgcttctgctttcctgaaggcagagggtttccaaaacaaagctgaaattcttggataggttactatggccatgcctctttttgctttttttttttttttttctgttgtggaggtaaaaataccaaaataatattagtccacttttctgtgttggttggtaatatttcttcataattcctccttcccttcctttcctagttttggttcattgagagcagttcgcagtcccaccctcctgcctttgaccatgaccatatgacttccttggccaatgtgacatgaacagacacgtgccagaagctttaaacgtgtgtgtggagtttctgcccatcctctttccctcctgccctcagccatgacgagagcatgccccgcgagtcactgggcccagaatgaagagacatatgggacacacttaagccctagtgtcactctggagcccagccggccgagcagcagctgatgagcagtagcttatccatgaatgaaatctaaatgaatgtgatttcagccacagaaatttgggagaggtttgttacacagtattatcacaacaaaacctgatttgaagagctttgtttttcagaggaggaatatgaagcttagaaagatgaagcaatttgaccaaagttacccagaaatcaatcgaagagtcctgttgaaactcaagtctgccctagttctccaggcagtgttgcagcgtggttggtgcacacaagcatggttttataatatcctgtatgctggctggagttttaggggtttccactgatgcctatggcagctgtaggcctgatatcctgccccactcaggaagacagcagctatcgtagacgaggtgacggacagggctagagcagggcctggggaagatggcagcaaaacagccggtgtgaaatgactggccctttaagttacttattacaacgagtaattcatttagaatttgagaaaacgaatgtcagaatgtggtgcttcacacacatgtggattcatatgtgtgaacctgagctagggagtcacactgctcagtgttaaattctagttccttcgctccccagctttctgacttataagttattgggacatctgtgtgtttcagcttcttcttctataacatgggatgacaggagtgctttcctcatacgaatgatgtgatgattaaataatacttataaatacatggaagagtgcctggcatatagtaggcactcaataaatattaactaattactagttttaatatctgcccttcatagcccagtggacttgatctaaagcactggccactttagcttactttttctgctaattgaaccaattaaccatcccatggttaaggtatgagagtttctgaacataaaatcagccctgattatttggagttgtgttcctttgatcattagtaagtttggacgtgcaaattggcaagtggtgtggctggggactttgccagcaagcaagatgtttaaaatcatatctcaatctcatctccaattttgcctttatcaaaatcctctgattataatccagttgcacagagcacgagactgatgtgcattaggaatcccattggccctgaaatctctaaagcctctttctgtttggactccacacatgaacacatgccatttgcatgtttcaaatattgagtgtcagctccttaaaaaccagtcagcaaataaatgaacaggaaagaaagatatggatctaggcctggatattataggtgatatgaatttatggctgtggccagattgccagagtcatctaggatttagcacagttgtcagcagcaggttagctcacagggagtcttctggagtctgggatccagccaaaggccagcaagacaactagggaacagaggtggaaaaattggctagctctgctgattggtcagatgcttggccccaccgcaagttagttttgttactttgaatggatgatgccgcttcctgctgactgagctcagcctggttcctttctcctgctccctgcaaactccattaactgctggaggctgagactgaggcctgggcctctccttggaccaaacctgcatgtgctcctggtgatacatgaaacaggagaagtggggtggaggtgcagaaagtgaagagtcctagacgtcaagtggaaacttggtgccaattaccttcttttttttttcctgccacatccaccaaagccaggaaattcctttctttgtggaatctgcttttccaatggagtttcccatatgattaaacactttgattatatatatatatatatatatatatatatatatatatatatatatatatatagtttgtttgttttgttttgtttttgatggagtctcactctgttgcccaggctggagtacagtggcacaatcttggctcactgaaacctccacctcctaggttcaagtgattctccttcctcagcctcccgagtagctgggagtacaggcgcacgccatcacacttggctaattttttgtatttttagtagagatggggttttgccatgctggccaggctggtctcaaactcctgacctcaggtgatccacccacctcggcctcccaaagtgttgggattacaggcgtgagccactgcacccgacccaattaccttcttatccagaggaaaggaaaatctcccagtcagttgccatcctcttgaaacctggaggtgtctgttctctgtaactgtttcccctgcctgtacctattatagtgcttactgtataacgagtcctcaatcattgtttacttttatctttttccaggactgataagtgtgttgtgctcaaaaatacttagaaagaattaaataatcacataatctctgagtgaagagggactttgtaggcagctattgcctgtcttccgtgatgtatttaactggcttctaatgcaattaattccattgatgggcagccgtgatgctcagatgctctttattattctgagtggaaacgtccctattttttagcagagtgaggggagaaggtggcccaggccttgtagacatatcctttacccccttctccatcctctctcattacagatgagtctttggctcagcagaatgggcctaggtggagcttgaaattaatgaagagatgctgcttccagctttttgagcaagaagaagtttggcctccagttattacaccttgaggtcagcgggtatctcaagtctgagtagttataaaagtgagctgatgtagaaacaccaccaaagcaacgttttatctaaatatttcagatcccccattataaatcatttattatgattacccttttggtgtcatggaatgagatgatgagcttttcttaatgaagtatttcatagacatattttttccatttatcttggtgttggatgctatgtgacctgaatggcaaatgaggaaatatttgtgcaactcctgaaatgcacacatctccccatgccagagtgcaggagcggacagggctttccctggcagcaataggagcccggtcctgagtagggcctctccagcctgactgcaccatagcaggtgacatctgacttggggtgtgccatgttcccagagctgcttttttaaggagtttggtgggagctggaggaagcatccacatctttaaaaacaaaccttaactcgtgagaagaaaagtggtaaacattcaaacacaatttgaacttttaatttagccttgtgagttcatctatatccatttccaggaaaggtcatgggctgaggtgtggtgcttcactgaaataaatgcactttggagttgacagtaaccaagcaaggccagggaccctgaggagacccctccccacacttgcaatgatcaaacatgctacatcttagaaattggatctgccggtttatggcaacttgacgtaaaatgtgtatctcaggtcaggctgatctgatttaaatatcttagtgttaggcattctctatctgacattgtgaaaacgcatataatggaaccaagattagaatatcaagatgacaagaaggattgtaccttgaagacagtaaaagtcacttgcattctggggttacacatttaatttaaaatagttttattccctgttcctagggtccttgtaactctctcctctgctatatttatattaaataaataattttaaatgagtcaaagtgtcttgctccttggcccactatagaatgtcagtgttccttttcaatatttctacttcttagatcctgccttcaccacaatgggggttcatacagggttggagtaggttgttcttctcaccaagttcccaagcccacataaaatggcagcatcatatttcaccggacccagctctgcagaaagtagtggaaaaaaaagtctgtgatggacttaggacccaaggaggcaaaacagagtttggcttttcccttagggctctgtatatgtcaaagaggaccacacatgggccaagtgacgtgcatattgtgcctgggtgatgctgccccagcttctacccaccatggatgggaccaacaaatgcttcccagctgagaggcagtcacagtgccagggtgatcacaaaattgcccagttggatgaagactacccagaaactggaggataacctcacccactctcagctaccagtagggtcaatagtaagccagaagtgaaagctttctttccattgcctcttactttgtttccccatgtcacagtcagctataccttcctaagccataactctgatcatgccccctgcccccgtttcagacccttcagaagcttcactttgtctctggaatgaactggagcatccgcttctcagcctctgaggccccacgtgcactgcacccgcccttcctcagcctccccatcacatggctctttccaaacccatgggctgagcctgctctcagggcctccatgtgccaccctctgctcagcctcagagtttccacgtgtgtcttagcctcctgttctgtgctgcaataacagaatacctgagaccaggtggtttataaataatggaaatatatttcttacagttctggaggctggaaaatctaagatcaaaatgccaacaggtttggtgtctggtgagggcccactctccacttccaagacgatgccttgaacactgcatcctccagcgtggaggaaacacagttcctcacatgtcagaagaacaaaagaggaaagagagagcccactctcaaaagcccttttgtttaaggtattaaacccaccatgagggaagagcctacatggccttaccacctgttaaaggcttcacctcccaagaccattacattggcaattacatttcaacgtaagttttggaggaaagaaacatttaaaacatagaaacatgtgttgtcctctcagcctggaaccaggtcctcattcttgtctttgtcgttctagatcaaccttcaggcctccacttaagcgagttctgacgtcagtgaatacttctgcagcatggaagtgccaggaccctcgttggcccctgatggccaaatagcctcactctccattagaagagaaagcctcactctccattagaaggccaggagagcgaaatcagggattgctttcaaaacaaacagtgtggcaataaagaatttcagaagaaaataaagaatttaccactgttcagtcatgaacgctcataacaggctggggtgtaggaactgtagttgtcacaaccccttttttgatagagaagggaaattgtccagaattatgcaaagcgtaagtggccaagccagcatttgaactggggcccccactttgctgtgctgtctctcacgccttctgcagggaagtgtccttggataaccttcacccatcttcatacctctcccctccacctaggccaggactacacgctctaataggcccagctccttttgcttcataatgcacagtttgcaatgtcctaatcatcatgacaatgaccgtttccagtgcttcttgcctgctgaatggttaagttcttgtgggcagaggcttgtctgttctccccgctatgcgtgtcccattgcttggcagagtctctgccctgcggtcactgactaggctgagcatttttttcttccactgggtgagcatctcagctgtcctgctagctggggataggctgagggagtgctacttccagatgtcttgtctgaacttcttttttttttctttttcttgagacagggtctcattctgttacccaggctggaatgcagtggtgcaattatggctcactgcagcctagatctcccaggctcaagtgattctcccacctcagcctcccaagtacctgagacccagggtctgctccaagggcctcaaccatgtcagctagtttttgtattttttttgtagagacagggttttcccatgttgcctaggctggtctcaaactcctggccttaagcaatctgccttcctcagcctctcaaagtgttgggaatacaggctgagccatgagctaccacccccagccttgtctgcacttttgagtggctcccttggcagggttctgtgcacgatggcagtggggaacagaagacaggactcctgcctcagagggtgtctgggggtatgggaagagagatgctaaccccacacagtgggcatgagaggcatcagctctgctcagagggcctccctgtgcacaccgaactgctgagtcttctctctgaggatcacacagatgtgagcagagcagtgaggaggcacagaaaaaaagggaaaactgggttccttctgagattctttcttgctacactgtttgtttttaaagcaatccgtgatttggctctcctggccttctaatagagagtgaggctgttttgctacagtatgggctgttgggggacaaataagccatttctgtttgctaacattaaaagaagcttccctgctgaggaggtgctaatgcagctggcagaagctctgtgatgggcatggtaggttagctattaggctgccaggagcaggcagcaatctccctatttagacatttcagaggaggccttccagaggccctgggttcaaatcccagttccacctcttcctagctctgtgagcttagggcgaatctctgtgtcctcacaaacaaatagtgggaaataacacttttccccattgcatttacaggtaagtgtggtggtttgaatgtttgtgttcctttcaaaattcatgctgaaatttaataaccagtctaacaggattaaaagttggggtgcccagaagaagatgattaaattatgagagtggagccctcatggatgggattaggtgcccttataaaagggactgatagagggagtctgtccgctttgcacttctgccctctgccatatgaggacaaagcattcctcccttcagaatgatgcagcagtcaggaggtcccctttgaggcagacactaggcagccaacctgccaggctgtggtcttggacttcctagcctctagaaccatgagaagtaaatgtgtatttgttaaataaataacccagtctgtggtattttgttacagcagtttatgaactagacagcaagttaactgagcctgaacttgggaaacagtttaacacacggttcactcattctcttactttcacccactgggctgagcattgaagatacgcttggtagacacgaggcaaatcttactttaagacagtcttcttctaggacagttcagatacctatgaggccagattcttcttttcacccttgcataagcccttttgagcaacttgctggatcccaactccaattcctttctcttgtggaagacacctggcattttcactggcgagcatccatcctccctctgcaatactttctttttttaactagtggaactaaggaaacattacattttttacgtctccaattcatgtgcacaaacacggcatccatggtgaaggacacattgtggatgcttttctaagttctttcatatgactggtaatacatggggaagactgctgggcccacggtgggcctccctgctcccctagactgagccactcaaagcagatctccacttctctgcatcattataacagccttttaactgatctttgggcaagtgacagagtcatgtccttcaaattggcagaaataaccggaaagtattctgtctcttctactggaggcttcttagctggtgaattggaaacctggcactcctggatgccaccgtgtgaccagagccagcctgagaaagaagccacagaaggaagcagagggagagatggagagacggcatttggggtcctggcgttagacccacctctcaatttcacagctacatgagcacctagattgccttgtttgattagctagtttcaggctgacatttaacttttaacccaaagtgtcctaatacatctttttcactcattcctttgttgcttaattagtaagttttaccctctctaagagtctatcctggatgtatgtcaaagtcggggggatgaagacactgccctgcctttggggaacttgtcttcttgtggataaggcatggtcaggccccaatcagcatagcagaaagcaccatgagtaagtgtcccggggctaatgtagaaaataatgaatctgggaggccaaacaggtgaatgggtgagagtctttcagactgcggagtgaatgagggcctgtgcaggaggtcacagtggagcagaggctccttccagagcccccagctgggccaattcagtgcctgtgcactgctcaactgagatgttaccacatcctccttctcccagccctgggatccagaaacccaacacccagtaatttccaggaatctgatggcaatcagctgggcaaggaatcactcagttccagaaacaggcagtgtcaaaaaggagattcaggctgggcacggtggctcatgcctataatcccagcactttggagtgggcaagaccggcagattacttgagctcaggagtttgagaccagcctgggcaactcggcaagactccatctctacaaaaattagccgggcatggtggctcatgtgtgaagattcagtgttagaatagcaagttaaactttgatggtagttctggatgtttgcctcccacttctgctccaacaggaaggtagtcaagattgcatggggcagactttgaattagacagtaagctttctgaggacagggccaattccttctcctttctctcctgtgtacctaacattaggacatacacatgtgcatgcactaaaaatatttaataaagatttgctgactcattttctaaaaacctctttgtgatatttctcaaaatattataaaccagagaaatatagtaaaccagagatacgaaatgaaaaagaaaatatactttcagtgtatttccagatgtggattgttagaagagagatcgtatagcatattggttcagcctggtgccagatgttctgggtttaaattctcacttcttcatttacttgatatgtgaccttaggcaagttactacatctctctcagcctacatttcccccttgctaagatggggacagtcaataggccctgtccggtgaaattgcagtgtggatcatgaggcaatgcgcaaagtgctgagagcagcacctggcccatgataaccatcacgcatgtgtcagttgttgctgtcattattgctattgaaagggagagagagagtgtgttattaaagatggaacccaggagcaccaagattccatgttctaaataacagctctcatagacctagggaagcattaattcatagaatgaaactaggaagtctctctgatcaacctttcacagtgagaaaactgaggcacagagagggaaagtgtcttacccaaagtcacatagcaaaatagcagctgaccctaagaaaatgccagagctccttatatccagtctagaattctttctgcttctgttcttcttcttctttttttttcttttctttttttgagactgagtctcaatctgtcacccaggctggagtgcagtggcatgatctcggctcattgcaacctctgcctcccaggttcaggtgattctcctgcctcagcctccctagtagttgggactataggtgcgtgccatcacaccaaactaagttttttgtatttttagtagagacaaggtttcaccatgttggccaggctggtctcgaatgcctgacctcaggtgatctgcctcccaaagtgctgggattaaaggcctgagccaccgcgcccatcccctgcttctattcttaactcttgggtctgactattgaccaaacatgtatagatgcaaaagccacacctcccaatggaaatctggacctaaatcccatagtgggctcttccctaggagggtgacatgcacaagagacagaccaagaaaagcaccagggctgcagcaggcgagggagtaatttccagcagcaaataaatctgcccattgccgaaggtcattcccgcgttcccttggaaaatgtgcactttgtgtttatgcagctttgaggcaattatttcacaagaaagaaaatctcttgatcacattacttaatgttttctaagtgaacatttggtatttagcggctaagcaaatttacttttctataatgaacagagagtggatgattgaaaaacatttaatatactgaggtgtgggtactgctgtctaaaggattacttaactcacagtttaaactctcattttttttttgaaaagcaaacagatttcctttatactggagagttggggattaactgttttgttcccattaaaatctgactaaatacatgaattgtgtgtttttgcttatgagctcttgggggatatacggatatacttttgtcaatattgaatagccttaccattttgtcaggatttcccattggtacatgcctgctggatggagagtcagttggtaagtgctactgatttagacaaaatcctagactgctagaattgcattcaggttataagagtttttaacattgagactacataaatgcatattaacattgtattcatggaaagcaacaggaacaaaccgtggttctcttcacaactagcaaacaaagaatttattcaaagagaatggagtgggaagaagagcttgaacaaccaggaaggtgaaggaacagggacaggacagcagcgagactctcagccgtcaaaagtttacggactttctgcgagattcacgtacagtgactttaagtccttgtgtctccttgttttaaatttcaaattcataagagagaaagttggagtggcccagctggaggcaggtacttgccaatgaattgatgagctaagaccagagaggcagggccatgcaactgtgtaattgctggggccattccaaggagaggagttgattgtgagttaggcagcaatccccaacatgcattcattgagccaggatggaaatgtcagcaaaaaccaagttgttttccttctttgacagacactgtcagtgtctcatcaacccctcccgcccatcacccttctgcactccctattccaggcacgcccatgagtccctgcttgcttctttccttggagatcaacatttagatttctcatccctcagatgcaaagaccccaagtggcttctacatcaagtcccataattccccagggcagtgaagcccccagttccctagtggtccccagcagtaacctgctccttagtgtccttcctttcttcttccacttccccatcccctacctgtgccatctgggatcacgtcccaagaaaaccacctgccccctaatccttgtttcagcatctgctcctgagagagtccagcctaagacacattctctctagaggcaaacaccaatgtgcttataactgatggctgctctcttttaatggacttaacagcagcctcactgcagagggagtctggccgtcccctggttttccagcttcagcatgactagggaagggtctggtggtgaagaaatgcccgtgcgccatgcctggccagggagagggtcacaatttttctcgtttggaaaaaggctgactgcgctgctcacagccagttttcagcttagcgtcagcttcgtggattgttttgggtctgtggatgttgcctttccaactgcataatgagctgcttgaagccagggatcacatcttcccttctgtttgtttctcccactgtacaaaacagaggggcggatacactgaagatgctcggaagagatgtgttgcttaattaaagaaccgaaagaggaacaggcataaccatttcattttctaggccgggggtggggggctctgctcgtggagtatggtgatggtccgtggagttttgagtgggctgttgcaggcaccctcagagacgttcccttttccctttagcactcactgtgtgcaaaccaaaggcttcttacagcaaataccagtggctccacactcaatcttgcacacagggcagacaacaagagccagggagtaaatgtaccttggaacagctctccaccagccaccactgggatatggcgggtgagcactccagcttctttgccccgcggctagaacaattctgaaacgtgtttcacagcatgcaccaaatccaacaggattaaactccattttcccgcaaggcaagctgctctaacacaccctgcattggttttctttcctctccatctcccagctccctgctcctcactcagtgctccctggagtcgctcctggcccccacatcttcatcacgaggtctgcttctggtttaatctgagataaagggaaactggtttctgcaggtgcggaaagttccttcagagcccaggaaatgattaagggagacttagtgtcagtatccatttactttaggttaaattcatttcctatgtggaccaatttctgatagaagcctctccttttttgttgttgattttgtttgtttttcatcctccagtacgtgcatgcttcccttcatgcagaacattcttttacaagacagacagtatttccccaggctggtgtaaattattatcgaacaatgaagccccttctctagtcatcattccggtgccacctggccaggctcagataaatggcctattctggaggtgcaggaaaccggatgaatcatgacgttatcccaggaacatggcagcccggcagccgggggatggagtatctgtaagtgtggccccatggaagctcctgcaggacagagcttcaccattattaaaatccatcctattgccaagtccgggaaacactgtaggcacaggaccagtggcccaggtctgggtttagaagataacattttcctcatggcctttttccaaatacctaagtttcatgatgaacaggccatccagaatccagttagtagggaaacaagtggcttacgtttcctaattttacatttagtctgttggtattaaaactcatgtgctgaactgggcattgctgctattaacctctttctcaagttgatattagatcagttttcaaatggagactctatttggagatggtcttgtatatgtttaggttattttacagccacaaagcctcaaatggcttcacttaacaggagttcttaaactttggagataactttgagatttgataaaaggctggtccgcttcccccagaccaatatcattaggtccacagtcaacattttgcatacagatatagtgggtagaccctcagagcccatccattgagtcactagggacttctggatctccagcaaagacagctgttggttgtgactggttagtgactgtggtaatcttgggggtgaagctccagcctgagtcatccttctgatgaccgggacgaatagtatgtctgatgataaacattgcatgtatgaggacgctgtgtgaagaatgccatacgccggtctataggaaaatccatcatgaagtgtttggggatagatactagacttgaacagtgcgtctaatgcatcttcgttctgaccacatggactacttaaaaacgttaaattcaagaagtggaattttgaatttaataactgtaggtattaatgtttcgtaagttagaaggatgttggtaccaccaattgcatttaattgtcttctgtgtttgctgttataatttatgtttatttttcttcaaaactgataatgtaatacaatagtaagttgtatataccttgaatatagcattggacagtatagattgttatataaaaataacattaaatttatctataaatctataaccccctattcagaggctaacacttcaaatagtttgatatttttcttctcatttcctctgcatatatgtatacagtttttattacttagcttaatatattatttgtttttacctatcatcagatgttatttttaaagtcatctttgaagatttagtaaattctctgactggaaccattcttctattgttggggcttttgaagttcacaatttctcactcttttttttttttttttgagaccgagttttgctctgtcacctgggctctctgcaacctctgcctcccaggttcaagcgattcccccacctcagcctcctgagtagctgagattacaggcactggccacgatgcccggctaatgtttgtatttttatttgtagagacagggtttcaccatgttggccaggctggtctcaaactcctgacctcagacgatccacccccccttggcctcccaaagtgctgggattacaggcttgagccaccgcacctggccacaatttctcactttttctattacgcttgatacccaaactcttttctgttcctccacgatgctctgacatgatcctaagcttcctgaggtcacctcccaagaaaatcacctgccctcaaatcctgggcaatccagtggcttatcagagaatgtattttttttccccaaacaagcatggtctttccttggaaagactgatggtgagtaattttctcttgctctttacaaatgctctgtctcatttaaccttcacaacaacccagggaggcaggtaccactttccccatgtggcaggtgaggaagctgagctcagaggggtcactgcctttcccacagccacgtgtggagtgagcgggatttgctctcagctctgccttggctgagtcctgtcttctcgccagcgcttctcgactgccctggtctgggtgccccaccactaccctctgtgagtccgtgggtagttgattcctttcctcaaggatctactttctcaccgccccttccatgtggaagttttagaaaccttgggctactttaaacaaagagccgctggctgactgctccctgcccagagggcaaatcccggtttcggagttgagatagacaattatgtaaaatgaattctgggtgcacccagttgtctaattaatgacacattatctatgtaggagaaaatgtatcttttggggctcagctcagactctacatctctcctcctgggcctccttgatgaaattaattggggcaggcagggggaaattgacattttagaagccagttttcattcttggactgaaagaaactgttccagtgcctgtttacctgggctgcaacacacacacacatgcacacacacatacacacacatgcacacacagatgacatgagcccctgaagttgctgtaatctaggaggccacagtccagagcaattgcattgaaagcagccacccatctcaacattgcagccgacgagagtgaaatcagggaacacattccaggtccaggcaatgaaggagaaaatgtgccagctcttgccacagccgttacttacaaaggttttccacctgtaatgtatttcccaatgctgtgtttctctgatgctggctctgcctacacccacaaagcaagataagagggaaagtggtggctggacacagtggctcacatctgtaatctcgacactttgagaggctgaggaaggaggatgccttgaggcccggagttcgacaatatagcaagaccccatctctacaagatatttaaaaattatctggacatagtggtgtgcatctgtagtctcagttacttgagaggctgaggtgggaagatcccttgagctggggaggttgaggctgcagtgagccaagattacaccattgcactgcagcctgactgacagagtgagaccttgtctatatttaataaagaaaaaaggaaagcagagccttggacatggcttggcctagtacacacctgtctccttggtgcattcatcctatggagcccagggggtcttgagctgtgaacttgtgagggttggacagagaccccaagcctctgctgctttattgtgaatacaatttgcattactagattatgctccaggcatcgttacaactacttgcagatattaactcatttaatcctcactgatgtccacatcctggtttatcaatgaggagacagccatggggaggttaagtatagtgtgctcaggtcacattgtctgggcatggtggggtcgtcagtgagtgtcttgctctgacttggaagggaagtaaggagtttcccgaggttcctcttgctcaactgcaccctccctcaccgctcacctctccagggttccgatttaccaacagacaccctcagggcacagcttgggagtcattcggacaaatgaatgctcaactgagaaatgggtagaaacaccaaatacatgctgaataccagctctatgcagatattgagctagacgcttctctcaacatggctcatgtagccctgctaaaaacacagcgggaagggggaagaacgaaagtaatgcatatagaccatgctacgcattccatcctatataagcgaactaacttcttagcctatgctagggttggtgaaccatgacctacaggccaagtctggcctgtcacctgtcatgtgagtaaagtttcattggaatccagccacagctgctcagttatggttgtctatggctgctttcacactgcagtgtgggatagagacctcatagacagcaaaacctaaaacatttactgtttggttctttacaataaaatgacccctgatttatgcagtccttataacaactttgcaaggtgggtataattttggagatgggaaaactgaagttcagggaattcgaagggttagtttgagaccacccagaccatggcaaaaccgtgacttacacctgcaagtggttgcttctcttgctgaatgatagggtgacacagcagcccagtgtccctcagggagtcggggggatggccccgctgtgttccagggagagggagggactctggagctgctgcactctgatctgcctgttccctcggctcggctggctcagccactgtgtcttgtcttgctctctccaagagcacagttgaccttccctacagctggcttgctaaaaccgtctgacatgggaacaacaatacattctatcacattcagcacaagaaatgagaggccacacaattacttcaagaatgaccaagaagaaagaagtgattaaatttttggcccccactttttttcctccccgagatgatggcgttgattttgagttatctccctaaatggctcgtttgtgggaacttccccaggctaatctgaagaagggcgatgattgcaggcagaagcgagtccttgccctgcagcaagatctcacacctcacatcctgatgtgggccgcagggagtcccagcatctctgagaccgtaggcacgaagctcaactcctccatcacctgctcctcttgccggacacag[450 bp omitted]tggcaatttcagtcctttaaaattattattttagaaagattcaaggtctttctcataataatacctttcatactacttttatctatctaatttttcaaagaaaagaaagttggatttagagaaagttctccagggtatgcactgttttgggatgagctatcccacacccaggtgtggcccccagtgcagatgtatttgctcctattgacaaagtaacaagtcacagcagtattctccctccaacctttgaatgtcagcaaaacatacctgcctgcaagtgtcccctgttgtgaatgccaggccccccagtccccggccccaagctcctcatcagcctcctgccttgcatcttccttccagacaccctggcctaggacagacacaagccagccagctctctccctgcctcccctgccccagcgcttcacacttgtgccccttcacaactggtgtcatgattaccttccagctgtgtgcttatttatctacattgtctaaataaagtctgcgttatcatgggtgtgatatgttagattcctatttttctaagatacaggaaaataagcgcatagcctctgacatgtgtctgtgtcgtatcagatgtcatctctgggctgcccactttggctgacatggctctggcccagctggtgctgctccttggccacggagctgtctccacttcctccacaggtcggggccttctaagacagccgttctgggccctcagtggctcacaagcccaccctaagagcatctcgccccctcctgctgtgcatatctctggttcctgccctggagtttccccgttgctgtggaagtgtgagatactgagaagtccacccacagtgcccacaccagcccccagggatggagtgttggggcgttacaccccatagagtgaaatttggatgagtgggaaacaggggcctatggctgaatccttccccttcctatcccactccccagcctctatgctgtgttgggacccagcagttcccctggcctccctaaagacttgctaagatactgagcagtccacttgtgacaaagcctcaccctactcatgatattctcaccaaacacgagcaaggcagacacagctcccctctgcctgcctcactttgctttcctgggactgcactcgacagcaaagtgtcagtaaagtcagcttctgcctcaagttctgctttctagggaacccagaccgcaacaaatgcgcagcctaaaatcatctcccagcccaccagggtacacaccacccttcgccaggtacacccatggcctttcccattgcttcatggtattatcccatcaaggctgctaccctgggggccaccgttcccggacctgcagctcctctcttccaccatttctgaggtggctcccaagcctccttccctctagcctggaagggacccacctcagggtccctgtggtcccaactctgcacttccctaggggcctcaaccctttctttcttgtatgtagatagtcacagtccatgccatcctcctctgatagatgtggtcctctctatggcagggactctttgagcctcattgctttctgctccacagacattggtagaggaagaaatgagttaccaagaggagaaaagtgttcatgtgtgtataacaaggggccatgtgatttaaaactgcaccaacctatccaggaagatgggttctctcaactggattagaatgtgatggatgttgatctgcccaggtgagcctaagccaatcttgagagcagctgtctcaggccaggctgccctgggagcagaccacaaacaagggaggagtgtagttggtttacctggaaggcgattcccggaagtaccattagggttctgggaagcaggaaaagcggggatgaggagctaattggaattgagttgtcggcatgtttgggttagggcatgggtctctggcctgaatcccactggagaatgttgagagtcagtgtggaacacagcacaaggtggtcacagccaaggagtgaggattctcggggtatccacctgtcggctttcctccagcattggtgagggctgcttctgacgtgtgcaagaatggccagaaacaaaaacccctgggaggtggagttgcagatgttgactgtcggcgactctgacttcatggaggtgcagtgggaaaccaacaatctccgcctcattagggctccacctccttcattgccatctcatggtgcacacagagttcggcaaaggagaaccccagctctcagaagccttgctgcatacccaagcgaaccactgtaggcatccaggatgcaaacacttctctgcttgatgctgaactagcttgccttaggagcagcccagcgtgaaatcccctcctttgctgagacaggctcacacgttcttccactacacatgcctgctgccttttcttcagctccatggagaacgctctgggcaccaaggcctaacttctcagcctcagcttaccaaaggcatatgtggttttgctaatttctaaagaagaaaaaccaccctgcttcccttggagccctaatagcaccaagacccggcaagatgaaggccccctgtctctctgcagagctgccatcccctgctgggctgtgcagtgacagtggcagctgggcgaatttcctccttgctgttctgaaacagaaattcattctgtctccaggccaagccctcagctcactcactgaacaccccgaccccctgcaagagctccaaagtcagaattgcatttagcttagggtgtcaaagccctgcactgagccttggaacacttcagtttcctcctgtcaggaaagagcaccaggaaaagaagaagggcccccagagatccgtaactggggctgatctgagctctcagggaaacgggcttgagagtctggggtttgtgtaggatgtttcaggaaagcagttcttgtgtgcacagcttcagggttgcctggcatttcatgtgacaatcaccgtgttgggactgaaatgatgtccctgccccttcttaactataggcagccaggaggacaatgttgaccaggttatgccagacattacctgtagaatagactaatgtgtttttctcagagttgtactgggccctaccctcaggctaaagaggtttcagaaatgatgatcagatggcttaggccgaaggttggagacacatgacacaggtgcagttaccacgctgctcttccccggggcagacatcaccaatcaatcctgagcctggaaacggcctttccagctcacccttctgggcagccatgactgtaagtcaggttacgcacacaagctcagctgggtccctggtgtgtttctcattgaaactggcacctgtagtgagtgccacgggacctggacagcacccctgacctgcacagcctctttctcacatatgccacacatgtgtattcatgagaattcactcactggttcattggataaatgcagtttattaaacatttactgtgtgccagggattatgctcagatgatgaggattcaaagggagtaaacacaagaccagagctgctccctgggagaagcctgcatagcccagcctcatgactgaaggtaaagtgctctgtctacaggcccagggcacaccaggcatgtcacagccaccctctgagcaagcagaagcccagagagagagggcatgagtgcagggaggagaaaggagaaagccagcagagatggattgagccaaatcatatgttctttatgacatcttgtttcccagacacttcccaggcaagctccaagatcttcaaggaggaaagggacaaactggcccttgttgggaggagtgagcaggctggccacccctgtctccccagcccaccctcactcttggggggagcagcacaggtctattcatacatggggtgatgtgatctctggatcaagggtcaacacctgcacaagggcagccatccagaggccagcagcctaggaagggccccaccaggggctctgaccaacttggggaggagttgacccatccatagctctggagcctgcacctgagcttacaaaaaggactggccagctggagtatgagaggcatataccagccatgagagagggagagtgagcagctgcacccaaaacaagtcccctccagaaggtcttctggcgtgcctccagtgggcctgtgtcctcctaattaccttcttgctttcttcttcttttttcttcttcttcttcttcttcttttttttttttttttgacagagtcttgctctgtcgccaggctggcatgcagcggtgtgatcatggctcactgcaacctccgcctctggggttcaagtgattcccctgcctcagcctcctgagtagctgggactacaggcatgcaccaccatgcccagctaattttttgtattttagtagagatggggtttcaccacattggccaggatggtcttgatctcctgacctcgtcatctgcctgccttggcctcccaaagtgctgggattacaggtgtgagccactgcaccctgccactttcttcttaaagagtctcactcactgttaccataggaatctcccagtaactgggatgatgagcccaggaaccaattaataggggtcattgctcaaggatccaggacttttactcaggacaggagggtggcaacctggcacttggcaaaggaaagaaatgagatgaatggagagaaaaggaggggccagtgcataaactgcacactgggctgggctctctacacccatcccctcacagtattctgaaaataggcttgcgaagtgggtgtatataagtgctattcctttacttcaagaaatgaggcttagtgagccacatcatttattcatgctccgtggctgatctgggatgcaaattcagtggatggcttcagatcagaaggaatccagctgctgtggttcaatgctctccctgatctgcacagctcattctgccttctgtggctcccacagcccctgaaaccaagcctcgtgtctagaagatgccccgtaaatgtccaaggaaaggaagaaggaagaagaggcaagcactttgggtagggaaaagccagagggaaggaagagcagacagcccagtacctggagtctcttatcatggcaagagtgggttcccagggagctttaccttgccctgtggagaggcccgccatcggggctccccccacattccctggcccctgtcaccctctggaacacacccactcggtgcatgcccactcccctcagcctccttgggtctctgtgccagctgccctgactgaccttgtttgcctgcactgagggctaaaaatgcctcaggagttacatcaccccaggatcagccaccactaacaaaggggggggtaggtgtaaatgtccccttgcttctttttaattgttttttcttttttcattgttgtttgtttttgtttgcttgttcttgagacaaggtctcacactgtcacccaggctggagtgcagtggcgttatcacagctcactgcagtcttgacctcctgggctgaagtaatccccccacttcagcctctccaactacaggtgcatgtcccaaagcctggctaattgttttttattttttttgtagagacagggtcttgccatgttgctcaggctggtctcaaactcctgtcctcaagtgatcctcccacctcagcctcctcaagtgctgggattacgagtgtgagccacggcgcccggcccccttgcctctgatcaggctagctctctaaaccttccagagctccctcttggggccaagccagcaccccctggggcctgttcttgatgctgcatccttgggtgccattttcctctctgccccactttctcactcttctattagtcatttctgaataattgtgttcacacagatccatattttcagttctttttctaggaaatccatcctaagatgagaatctcatcagaaacttcccttccaggcctgaagccttccagtagcctctttgtggacatgtcagagctttggtagagtctgaggctcaagttcaaatcctgagcaaggtcttaaatattcctgctcagccggattcaccctttgggatgtgagtactagtggtaagtctcgaattttttaaggattttgctcaaaatctttttagggagttgccaaaatgccccaaccaaagcaccttattacctgtcttggaaaattccaatcagggagatttgggataaagtagacatcaaaataaagcttttatgagtagaagaattataacatattcagcattgttttagcccatccagaatgccagacactgtgaagttctatttgtgagctaccatttattcctgccacaaccctgtgaagaatgaatgatcatatttctcttccctctcacaaatgaagaggagactggagtcaaagccttaagaaatccatcttagcacacctagagtccagtgaaagagagaggctggcggctggcatggtctctcttcctggagtgggcaatggccattagcaagacctggaagaagttagcaagttctcccaggagtggctggttcagatgccctgcctttcaggccaggctgaagcaagaggcagaaacactggttgatgaggagtcaaggactgccattcaccaaccagtgcaaaaccccgtgtgctcagaagcccctcctgggacctgaccttccacctcggtaaggacagaaacgatttggtaaggtacatccaccttggagaaggctggatttgcttactcgaaaccagagagcaattccaatttgagtgaagaggaccacctgagtggggtgaggaataagtgcgagccagcacagagtgagcaccaacagcatgaaggaggctcaggtagctccatttcctggcactgactgtatgctgggcgtcacgctctgtcctttctctcatctaatcctcagggtggccctacagggatgttctgctctcatccctgttggagtgtcaggaagggttagggaagatgaggcccttccccaaggtcacgggctcctaagtggaggctgtgggatgggacctcagctgcccctgactggactctcagccgctgtgctgcactagtcatgacaggtttccaggagcccacagaacctcagctggggaaggggctctctcggggtggggcctgtgatgaccttgaccctgtctgcagagaagaggagaacgggagaggcgtgactcatcccctgccagtatggccggactcacaggcagccttgcctctctggctctcttgggacgggccactgccatggtgtcaggattgccactttcctgtcctcatcactgctgctgttaataacacacgaataattcaagccataaactttgaggcacaggctcctctctggccctgggggagctgccaaagatagctcaggctcggcagccccgcagcatggggcgagtgagagaagcgtgtgggggaagcgcttgtccctccaggctaggctctctcagtgcttccagatgcactcagggcctcctttcctccacggcaaggcccctcatgccgtcagcccgtgggcaggaggaacagcgctgggcggcattgacgttctgtgttaaagcctagaagaggagctctcttcctttttcttcccatagggcatctgtctgggaagcaatggttgggcctggagggatctctggggacatccttcctcatgagctgggcgtagaagaccaggtgttcaccagagaagaaaagccctggcagcaatcctgggtggtgctgggtggtccctgtggctgctcctggccagctctgagagaaatcatttagcagaaatggtgctttttccacccaaaatgttgtggggggcccaggaagggctaaatctgcaactcgaccaagaggccctccaaagaggtgtgggttttttgtgctcccagtgagcagcctgttgctgggtgacaagccagctgggctcccaggactactccaagttgtatccctcaaagttccacattttaggagacttctctgactcggacaaagcaggatggggagcccagagccagtgggggctcatgaatgagatgtccagaaaaaagctgttcttcaagaaagattttaactttaattaattaatttattcattcattcatttatttcaagacagagtctttctctgttgcccaggctggagtgcagtggtacaatctcggctcactgcaacctctgcctcccaggtttaagcggttctccagtctcagcctcccgagtagctgggattacaggcccacgcctccacgcccgactaatttttgtatttttagtagagatggggtttcaccgtattggccaggctggtctcgaactcctgacctcgtgatctgcccacctcagcctcctgaagtgctgggattacaggcatgagccaccacgcccagcagattttaattttaaatcttgaaacacaacaaaccccagccatcctccatgcctgtggggtgcatgaggtggatcctcacacactgcaccagaagcatgactggcagcaacaggcagcttagaaatgtctgatcatttcacccagaagctttctcctgtggcttcttaagaagttataagaaactgtggcacaaatcttagtattacaatgttctcctcttcctcacatattataaaaaaataaaaacaaaaacaaacaaacaaaaaaaccaagggaaacagatcactgatcaaaatacacaatgattaaaatcattgtcctttgaccatgcacagtgactgatgactggagtcccagcactttggaaggcagaggtaggaggatcacttgaggccaggagtttgagaccagtctgggcaacatagcaagacgctgtctttacaaaaaaaaaatgttttaaatagctgggtgtggtgtgcacctgtagtcccacttacttggcaggctgaggtgggagggtcgcttgagcctaggagtttgaggctgcaatgagccatgatctcaccactgcactccagcttgggtgacagagcaagaccttgtctcaaaaataaagaaagaaatagatctaagtctttcattcctgggcagtattttccagcaaagaattaccttgttctgtatgcctgtatcttttctttttcctgtcactgaatcaactgtacatatggtataatcctaaatttgtaaacaaatattaaaaatatgcacataaacctgtttacatgtcagaaaaaagactagaacaaaatatacaaaaaagagatgactttgacattttaagagacatcacatcttttttttttttttttttgagatggagtttcactctgtcacctgggctgaagtacagtggtgtgatctcggttcactgcaacctctgcctcccaggttcaagcgattctcctgcctcagcctcctgagtagctggcattacaggcgcccaccaccacacccggctaatttttgcatttttagtagagacagggtttcaccatgttggccaggctggtctcaaattcctgacctcaggtgatccacctgccttggcctcccaaagtgctgggattacaggcatgagccactgcccctggcccctttttctgttttataatgtaagcaatattgaaattccagtggaaaaaaattctctttaaagttaaaaaattctaatttcgagctaaagaaaactgagaacaataacaaatatcaataccaccaaaaatttctaaaacaattacagtttctggagtgctatggctcatgtgacagtgagaggacatggagcaggcattatcatctccaattcacaaaggaagaaacccagaggccgtgtggctccctccgtgacaacagctcacaggtgagacctcgtgggccgacctcaggcctcctggcatctagcccgtgctctctgtgatctgagttgcctttttagacttctagggcagtcgctccttctctaaaaatcagctagaagctcccctgagtgataacgggttgagtttgcctagcacagccctaatttttgcctatttttctggcatacttagtagtaccctttttactctcagaaatagtccaatgaggaaaataaaatgcctggcctccttttcaaggcatattaacctcttcatgtttctgtcggaatttcacaaagccaccctcctggggccaggagtggaggcccgcgagctcccgccccacgcctggtgggtgcagtctccagctttgcgctttgtttgtcattctgaacagctctgctcccatcagctggggctctgtgaatcagagacgctgcaaagagcagcactcccaggagctcagatgaaatgcgactgagggcaactcctcccagccacagacagctgctctgcagggaggctcagcagcgcccagcaaagtgcctgctgtgcactgaaagatcctcaatgggccctgattttccgtttgtcctttcagcagtcacacattcaacacattgttgaggagcagctaagcgccagtcttgggcacagattaaagaacaagaaagaaaatgccgctgtgcttacggtactaatattctagtggggattcaggcaacgcacaagaaatgcacatgaatacatacaaaaatagacaggtgctatgataacacagaatggtggtaggtcggcttcaaatggtgcagtcagggaaggactccggggagggaattctatggtgaactccaaacgggaggaaaaggtgggcctggaaggatttgggctggaagagagccccactctcccaggaatgtcaagggcaaaggccctggggtgggacaagcttctgcgcatttgaggaggatggaaaggaagctgggtggctgacctgtggagtgagaggctggagggtcagtccaggcagcgcacaagggggattgcgaggatttgggactcagctctgactgcagttaagaaatatttgagctgctaagtgataagccttggcgtcatccacacagtgttaattctgcaggcgtgcagatctcaagagtggtgggggctttcctcgtgggtcaccaggcggaaacctgccgcaagggtggagccccccacagagagccccttctagggcaattccaaacagaaaggtggggtcagagctgccacagagtccccactagggtaatgcctagtggagccatgggagggggtccacttcagggacccccagactgcagagcagccagcttgcagcatctcatgggaaagattccagcccatgggcgcaggaacatggagtccatcaaagccatgatggggtgcgggggtgcagggtgctgcccgagtccttgggggcccaaacctcccaaagtgcattggatgctggactgggagtgaaaacaggtgattctccagcttcgagatttagtgtctgccctgctgggttttggacttgcttgggctcgtcactctcttcttcttgactatctctgccttttggggtggggataccctgccctattcccatcccagcattgtgtcttggaagcagatgccttgtatgatttcacaggctcacagtaggaggatttgcctctggatgaattgaaccttgaatctcacgcacatcagattcagatgggactctggacttagcactttcaacttaatgctggaataaattagaacttttgggcaggctgccatggctcatacatgtaaccccagcactttgggaggccaaggtgggaggatcacttcagcctaggggttcagcatcaacttgggcaacctagtgagaccctgtctctacaaaaaataaaaaaaaaatagcagggcatggtgacatgtttctgtagtcccagctgcttaggaggccaagggaggaggattgcttgagcccaggtatttgaggttacagtgagctatgattgtgacactgcactccagcctgggcaacagagtgagaccactttttttgttgtttgtttgctttgtttgtttgtttgtttggctttggaagtactgagatggagtgaatctattttgtatgtgagaaggacgtgagttgtgggcggccggggcagaaggctgtggtttgaatgccccctccaagtctcatgtgcacacataatcctcactgtaaccatgctgagaggcaggacctctgagcggcaattaggactagatgaggttatcagggtagagcccccatgatgagtctgggactttataagaagaggaagagatgtctaagctggcacactcagcccccttgctgtgtgaaggcctgtgccacctcaggactctgcagagaggccccaccagcacgaagaccctccccagaggccgctcctccgccttgaacttcccagcttccagaaatgtaagaaatacatctcttttctttattgaaagaaagaaatatttgcagtgctgagtgccatgagcaggtcccctggttcctctaaggaggacacacagaaggagagaaggcatgagtgtggcagaagatgaccgggagaagaatgcaggggctgggagcgccttatgcaagaggggctgcagtctagatagagaagtgtggtgtcaaggctaagtttgaaatctgaatacagtttgcacattaaaacaaaaaagacagggttgtctaggctggtggaaattgggagggaggagcagaaaaaaataaccaaggagtacatttcaccattagtttaagtgagtggtagatggtgtgccattctctgagatgtgataaaaagggaggtaaaggtttgggggttggggtgtcctggcactgagggagggactacagaagctgtgtttcagacatggtattctgaggtgtctctaaaacatctgagtacagatgtcaaagagacggtcagatatgcaaggctggagctcacggctaaggtcttggctagaggcataaacgtgaaaagcatttgcatatgttgaaggcaagatggtaaaactcctcaagaataagaaagtagtcactagtgtcaaaaatttgcagagggaaaaaatataaggacattttgctttttgtccatacatttggccaaagtaaaggtgattggtgacattgatgaagcagttttcatggagctatagggcaaggttcacattgtggacacggagagccctttatcagtacagcggccaactaaataaataaaaattattgctaaggcttattccaaaacaaactcccaataatgctggataaaatgcataaaacaaaccaagttttcaaatgcataaattagcacacaacaataagacaaatatccagaaaataaaactagggcagaaactaaaactaaagttataaccatgacctgccagtctccccagccagtgagcttaggttttcatggcttctgggagatgaagccatgggcctgagagagctgggcagttggagctaagattttctcctgcccaccccacagaaagccaggagctctggaggggtgccatccccatgaaagaatggctagaaacactgaggccactacacagagagagaatagagaagcctgtcctccttgacgtaggctccaggacatggtaatgttttaaagtggtatccaccatacggttaaggaaaacagcctctggcccctagccgcgacaccatgaaatatgtatggcttccttctctgttcatcccctctccgtcagatctcccctgggaacacagaattattatccctgaatcacatgagacctttccattctccaaagctatggagaaagctacctcaaatgtcaatgtccgcatatccagtgtcagagttcaggctcacctctccttcaaggtgtccagctgaacaaacagcctttcactccaacactttcatcccaaaccatggcaatgtgaatataatttttaaaaaagcaagccaagcccaaacaaattctatgtttataccttcctccttttttggttaacctctactaagggacccaatagtgttacttttgcatgagaatctgagtttataataaaatagttctgctatgctcacagtctttctagtctttgtagttctaaattatgaatccctgaggagcttggctgggagataatctacataacagacagcacactccatcagaatttctcctataaaacaaccaagatcacggagtgttcttactgggtgatcttgccatgcctggctccctctcccctatagtggggactctagcagaaagattcttggaaccttgaaaaatggccacgtagggagcccggctaccagtttaccagttgtacttggattgcagctgtgcacagtgcttaggctcaggccccattcatactaagaattcctttattccatcatacaggagctcaagagcacatttaagtttactttattcatttacaatttgtattctgtttatttatttactttgagatggagtctcgctctgtcacccaggctggagtgcagtggcacgatcttggctcactgcaacctctgcctcctgggttcaagcaattctcctgcctcagccttttgaatagctgggattacaggcgttcaccaccatgcctggctaatttctgtatttttagtagagacagagtttcaccatgctggccaggctggtctcaaactcctgacctcgtaatccgtcccccttggcctcccaaagtgctcagattacaggtgtgagccaccatgcctggcctgtattctacttattttttaaaagatgagattaactcaaaattacataaatgtattaaatatgtttttaatctctcaaataatgacataagctatatatgctatatatatatatgtcattggtttgagagattaaatatatttaaaagcagaattacagttgagagattgagatcatttctgtaattgtacactaaatataacacagcacttcctggtagccaaggcaaaatcagaaacaagttcagttgcctggctctttttttatcttatcaaaggaagcatacctgttgtttaaaagaaagacttgataataagtatgaaaacattaatatcaccagagaaaataaagcaatttttaaaggtaatgcatgttaaagataaggcattatgtatataaaatgcgtaaattttgtatatgttgcttatgcctggaaccccaacgacaatcttccagttgtgtcgatgaaattgttcttgttgcatttcagtagcttcaggttcccggagggagaatgtgaatattcatttatttatgacttccttgggacactgctaaaataaaaattatctgttgaaaaaggagtaaacagcaaagagaaaaaggcaatcacaaataaaattatcatcaaattttagaagacaaatagttttacgtaacaagttcatgaatgaaatggacagagaaagctgcattttagaaaagcaactggactgtagaggagatgaaagccagtctgtcgtccagcaccccagacaagactgggctcagggtccttcaggagtggctgggatcaagagaattcttagaagtctgcagtagtacaccagcaggttaccttccccacccactggtccccagaggaggacactcagtaggacagcttgcttctagcaaagcccaagatggcttttctctaaaaacattgaaaagatacatggtggatgcaaaagcatttggggtggacaatggcagcccagcgtgacaccctcctcattctggcaaggaaagggatggacagaggcctgacactcaactctaatattctcccccaccctacacagggctcctagtcagacactgtataagtggggggccacccaggcatcaccaactgtaggaagagaattggcaagcaggaagggaaggaccaaaatgcacaaatagaaaacatgaccccagagaaagtagtcaattaagggaatagaaaagaaaagaaaagagaatgtgattccgaatttactcaacaagattcaaaacatgtattagctataaaataaaaagaataactgaaattggtaaatcaaatacagataatgagaaggaatgaaaaatatggcaagtaaagttggaagaatcttccggaataaagatcaaaaagtaaaaaataaatagggagagaaaactgtgcagaatatcccatatctaatcaaagcccccaaaagaaaagagacaatggatgggagaaaatgatcaaataaatatcagaaaaggcttttctagagctgaaacacttgatcttcagattgaaggcaggacgatcacttcagcctgggagttggaagctgcagtgtgctatgattgtgccactgcactccaggctgggcagcagagcaagactctgtctctaaaaaaatttaaaaagtgtctaccaaggtcccatgtctggacacattctcatgaaagataaggagactatcttaaaagctttcagaaagacaaaaataaattcacctatgaagagtgggaatgaaaaagcagtatttctcatgagtaaccttagatgttagaaaagttaaaaagaggccgggcatggtgggttacgcctgtaatcccaacaccttgtgaagccaaggagtttaagacaagcctgggcaacataggaagactcaatctccacaaaatttaaaaaatctctacaaaaatttaaaaattagcagtgtgtggtggtgcatgcctgtggtcccagctactcaggaagctgaggctggaggatctcctgagcccggcagttcaaggctgctagaaaaaaacaaaataaaaatagaatgggatagagattttttattgttattgttcatttttctttaagtttttaattgcctattaaaatatatctgtgactttaagtccaaatatgaaacaaaccaaatgaagcatacttttaagcaattaataaagaggaagaagaaagaccatttgaccttagtgttgggaacagccggttgtggtacaggagtgaggtagctggacccagggagagtgacgtgcagccctactctccatagcacaacacttctttaaaccattgcgtgatccccctgtcttttcccttactgtctgcatctcacccctcactcccaggggactcctcctgtctgttcatcacagtaacttcagcagctggagcaccacctggcacttttcaatgcataaatgagtgcttatactgccttaatattacaaacattgtttattagatttcaattttagaaacacagttgggcaaagaatgggagacttaatagaggtggaaagatgtactaaggcccggcctggtggctcaagcctgtaatcctagcatttgagaggctgaggagggcagattgcctgagctcaggagttcgaggccagcctgggcaacacactgaaaacccacctctactaaaatacaaaaaatttgccaggcatggtggcatgcacctgtagtcccagctactcaggaggctgaggcaggagaattgctagaaccccagaggtggaggttgcagggagccgagatggtaccactgcactccagcctgggtgacagagtgacactccgtctccaaaacaaaaacaaacaaacaaataaaaaaacccaagatgtattaaagtgtgaatggccttcagatgtaaaagtagaaacatggctgatgaaggatggatcctggagggggaggctggagttgatggaaaaggcaaagaaaatgttagaagttctgagattctcatccagaaagtggagggcagagaactcctggagcaagcaatagcgctgaattatatttaaagttaaattaattcaagctgttggccgttatgaataatgctgctatggacgtttacttacatgtcttttcgtagacatgtgttttaattatcttgggtaaattcctgtaaatggaaatgtctagaaaaggcaaatgtatggagacagaaagcagagtggtgcttggctactgttgggatggaagtgatgttggctttaaatgggtaggagaacatttctaggatgtcagggatgttctgaaactagattgtggtgatggttgcacagctctataaattaccaacaccattgaattgcacacttacaattttatggcatagaaattatatctcaatattatattttaaaaatataataagtaaaacttctaaaagaaaattataggagaataaccttatgacttgggcataggcagacacttcacacatacacatgcacacacagacacacacacaaacacaagtgccaataaacacacaaaaaaacacttaacatcattaagtcatcagggaactgcaaattaaaactataatgagacacaactaccagaacagtaagatatcagcaaagatattgaggaactagaattctgaagcattattaatgggaacataaagtcatacattcactttggaaaaatgttctggtggtttcttataaagctaaatacacacaacatttctgcttctaggtgcatatctgcaagaaataaaaacatatgtctgccaataacatacttgtacaagtatgtttctagcagctttatttatgatgagcaaaaactcatggaaacaggccatgagtccatcagtaaacaaccagatagacaattgacataggcagtgtcatgaaccatctcaaaaaacattatgctgagtgaaaaagaaatgctgtttataaaacattatttattttacagattctttctgtatgagttatggaacaaggaaaactaatctaccatggaacaaatctgaacagtcattgtctctgtgctggggacagtgtagggacgtggagaaaaccctggggcagtggtaatgttcagtacctcgacagaggcttcggctacacaggaatatgtgtttgtcaaaactcatttgagagtacacttaagatccgtgtattgaattttatacacatttcatttcaaaaagataaagaaggaaaaggattgccctgagaatgagagtggtattgactataaatgggtatgggaaagttttttttgtttgtttgttttgttttttttgagacagagtctctctctgtcaccaggctggagtgcagtggcatgatctcagctcactgcagtctccacttcctgggttcaagcaattcccctgcctcaccgtggggtggtggaatgttctaagactggattgtggtgatgactgcgtggctgactgaactctggatcagtattgcaggctgaagtgttgacaggtggagtgcactgatgtctccaacttactttgaaactcatcaaaaattaatatggattgatgacagaggcacagacaaatgaaaagatgtgcgataaagcaagtagagtaagatgttgatgaaataatctatgtggtgtgagtatgggtgttctctgtgaaattctttgaactttgtgtatgtttgaaaagagtcataataaaatgtggggaacaatgtaatcaagggaagagctaaaaataatacaactattaaacataaagaagagaaacagaggaagaggtactggtgagctaagtccttatttcttatttttgagagtcaatagatattctctaaatttaataaatcttttaaattatttttatttttttcttttttcttagagtcatggtctcactgtcacccaggctggagtgcagtactgtcatcacagttcactgtagcctcaacctcccaggctcaagcaattctcctgcctcagcctctcgagtcattagaactacaggtgcacatcatcttgcctagctaatgtttcaaaagtcttttttctttgtagagaaaaggacttgctatattgcctagtctggccttgaacttctggcttcaagcgatcctccagccccagcctcccaaagtgctgggattacaagtgtaagcaactgtgcctggcctcaatttaataaatcaatacagatatacattcatattatttcacacaatggaggtaaagaacaaaggaaataagacagaaactatctaaagaaattatctctgagacataagatgggggaagtgcattaaatttggctttcataataaccttttgaattttttttaccattcaatgtattactttgataaaaaaaaaaaaaaaagaacacacagaaaatgtctctgagcccacagacacattcatcagctaaaggactgccgaggaccttagcccaaagctctctgcccactctctgggtctgagtgattgacgatgtcgggagtgtcactgctggaaggaattcaggatcagaaccactttcatcttgtgtcaggagtctgaactccatggctgtctggtgtctgccaggtgaagtgcacagctaaatgtgttcagattattccagaatgggtcattattggagtggggaaaacaagtgcccacacacagttgaagcacacgctgggtttttactgattcccaaagttattcccttccttccaaaatacaatagtttgatccctctatagtttataagtgtgatgattgggtttcatactcatgtgtgagatgtgcctccctcaaaccctctcatgccaccagcacataacccatcccatgtgaagtagaataagacaggttgcacaacatggcaatttgaaagttagtcatcatctcaatgcaagcagatgggagagaccaaggtgccttgcacttgaccctactaggagatttaatctcattgcaatggaagaagatggctctcatctgaattgtctgcttctatacttgatggtactctgtgtgctgagaacctgtttcttgccaagtgctctgtggctctaagggctggagattctttgatttcaaaatttcctaagtccagtgcttctggttgaggttggctgctttccatagcatctaggaactacattcccatggacaatcaccatttatccatccagccatccatccagccacttatctaacaaatactaacagaatacggcacatggcgctcattctaggagctcaaaaaattgctgtagacaaggatggacaagatccttgcccttgtgtgctgactttcagttatttagagcctctatagatacatgtttgaatgtcacgaagtaatttatcagggttgcctaggttaaaaactgattgaggtggagaagatatggtggcaagagaagaactcttcggggaggtggcattttatctgggacagaaggttgaggattcagctatgaggaaagtatgagagagtatattccaggtgacggggaccacaagaacaaagccctggaatcagaaggagcttgatgtgtttgagaaacaaaataaaggccactgtggctgaattttggtcacatgagatgaggtagaggaggagatttgggacaggtcttttaggaccaaacagatcttggtaagaaatttggattttattctcatttgaatgagaagtcatctcatttgaatgagagggttttaagcaggaaagtgacttaacagaatgtgtattttaaaaagatgattctggatgcactgtggagaatggaagacaggaggatatggatgaaaactgaggactgttttagactttcagggcgaggcaacagtggcctgaatgcctatggtggtgatagagatggagggatgtggaataatttgagatgccatgacactgtttttccaattatttttttgccaaatctgccattactgcacctttgggatggaagtcactcagtgtggtgtttccttcagtgaatcccgtctagtattccctgggtccactctggaaggagatattggtctgccatgcttttgggaaccagatagcttgcttggggctacagcatagctggaggacacttcctcattacctacaaattgtcctcagtacttagaaactgtcacatcaggccaaccacttggatctttcccagctctaatcagaccctgcccccctccatctcctggttctattttcactacttgaccacactcttggggagtccaccccagaggccttactgcctaagacaagataatttcccttttcccagttctagaaaaatgtgtgggattggtccatagtagactgacctatttaacatgcacgctccagaaccagccacaagggtcaggggaatggcacagctgttgtcttgagtcagctgtcaactgctcaagctggtgtgtacaggaaggagctgggcaccagacccacgttgtctgagaccaacaggaggatgattcttcaaggcaaattgagatgctggcagcagcagaagggagaatagatggccggaaggcaatcacaatgagatctctgaagtatctttcaagctgtggctcccaagctctctcttccaggaaccattctatatctagtctgccttggagaaccagcttcatcatacagtggactttctcgtcaaggggaaatgcagacaaatcttgtcagtgaccaggtccgatctttcagggaagtcttgcaagagcctaacccatggtctacaggtttctgtgcatgcactgtgaacaagctcccactggtaaagaccgcacccagtgttgctgtttcaaaaagttccaggaagaatctcagccctggaaaacaaaaatgagtttgacccagagatgcctgagttggagatgaactttgaagaactacccttgttagcatactgaaatctccacccagggaggagctcatgcaccgttttctgtacatgtgaggtatgtggaacatgatcagtgatgggctttaatccatctccacattcaatgactcagctcaataaaagccaggctttcacctttgttctgggaggcactgcttgggaactatccctgatgtcctccttacttgctgcaaggcatcaaatccccctgttatacctgccttggctgtcgtcattggacgtcacctgccaagccattgaacccacctgtcatgtgggtaacaaaatgagaaacaaacaataggtctgattgtctgactgatcatctgaagacatggtatgaagatatttattcaacacataattttaggtgtataccctggacctggagctgtgcaaagtgtgtgagacccaaaggtccttcacactcacgtgacctcagaaagagcccatgcctgcctcatggacagagcacagcacaggcacagacgggcgctcagtggaagttgtgagtaaataaatgacagcttagcacacgcgtcggtctgaaagaggcagtgaagttaagtgatggatagaaatcgctgttctcagagccctcagaaacgctcttctcacagccatgcctccaatcagtcactgtaggctccttctgcctacagaaatgaagcctggtttcttcacctgggaacacaccccagatggaggtcccttggcatcactggtatgaggccccctgcccagtgtagctccctggtttgtccaaatcctgctcactttttaagactcagctgcaggaagcctcgttccctgcaccaagttccactgtgtcgcctcctgcctgtgcacttccactacgtgcgctcctgcctgggcctcctgccttgtgttcctgctgacaccccctgtcactctccctgccacctgcattacggaggacccagtgctcacctgcctctcactcaggatctcaagcacttgagagcagaggctggcctcctgcagccctggccaagaccctcccaccgaagacacagacgatgctctcaccaggtccccactgggcttgattgctttattttactcttagaaacagtgtttcctttaaaatgcccaaattgggccaggcgtggtggctcacgcctgtaatcccagcactttggcaggccaaggcgggcggatcacgaggtcaggagatcgagaccatcctggctaacatggtgaaaccccgtctctactaaaaacacaaaaaattagccgggtgtggtggcgggcgcctgtagtcccagctactcggaaggctgaggcaggagaaaggcgtgaacctgggaggcggagcttgcagtgagccgagttggcgccactgcactccacctaggcgagagtgtaagactccgtctcaataaaaaagcccaaattgtgtcagttgatgcagtctttcaaatgctattatgctgaatatttggtagcagcaaatactcaggctctaatctgaaaagacatcattatcatgaatgcctgttcttaatcagtatggactggggcaaatggctctgcagagttttctggattttagggttaagctcctggtctgctggggagaggatggggccaaggagagggtgaaaaagagtccagctatgcttcaatgagtcacttcaatgttatttggttcattgaggttttattggggaaatacttatcatcaacagccagagagacttttggaaaaaacatgcaagtgattgatgaattttcaaaaagaaaaaaaaaagagtatgatgaagaaaatgacaccaggatgtgcatccttgctggcaggaggtctagggtttcaactcacacaccagatcttactgattgaaaatggcaaatatgccaggcgcggtgtctcacgcctgtaatctcagcactttgggaggctgaggcaggtggatcacttgaggtcaggagtttgagaccagcctggccaacatggtgaaaccctgtctctactaataataaaaaaattagccaagcatggtggcccctgcctgtaatcccagctacttgggaggctgaggcaggaaaatcacctgaacctgggaggcagaggttccagtgagcagagatcgcaccactgcactccagcctgggctacagagctggattctgtctcaaagaaacaaaacaaaacaacaacaacaaaaaaaacaaaagaaagcagcaaacaaatattccatgactgactagtgatgtctgccatggttgtggaatagacaaatgaagacaaaaagaaattcaactacatcattaaacaacaaagagtattaatccatcaaaaaagcctatgagaaaaaaaaagccttcacttataaattcttctctaaaacaaagtatgttttatgttggagagcggcacatggtttctattgaggttgctcagatgaagagagaattctgaagctgctggtagccatcttgtcaccaagaggcaagaagctagctgaaagtgaagacaaatcaaggaaatcagagccaagagacagagagagactaatttctaatgatgtcctttccaaacctggacctagctatcctcttggtcaaaaagatctacccttggtctttagttacataagcttattttttctctgtttacttaaactaatatgaattgggtttacgttatttgctacccaaagaatcctaatagatttattaaaagagccgagagggaaatatcttgtaggaagatcacttaatttcttttgaatttgagtggtcttatctgtcagtggaaaataatgaacttacctgtatttgtttaataggattgcagtagaaaccagccaggataaaagatgtcagagttcttggaaaaatgtacatgaaatttcaaaaattaaattccagcaggatatgtgagtgtgtgtatgtatgagtgtgatttgtgtgtattctaaggaagaggactaggtgatgtgtatttcagatgaggtagataatccactaccttctgtttttgatttaggttttggaaaccctgatccataaaaacatgctgctatgtatgttattcctgccacatccaccaaagccaggaaattcttttctttgtggaatccacttttccaatggaatttcctatatgattgaacactttgattatatatgtattttttttttgatggagtcttgcgctgttgcccaggctggagtgcagtggtgtgatctcagctcactgcaacctctacctcccgggttcaagcgattctccccactaagtctccagagtagcagggattacaggcacccactaccatgcctggataattttgggatttttaatagagacagggtttcaccgtgttggccaggcttgtctcaaactcttgacctcaggtgatccaccagccttgggctcccaaagtgctgggatttcaggcttgagcccctgcacctagccagattacatatgtatttttgattatgattttcttacagcatcctgaaactttgaacttagtgatttattcatgttgcctgcaatgccccctgtttagcactgcaatgctctggcagtgttatgggctatcccccaaaaattcataacagcatgtgactgcattgggagacagggtctttaaagaggtaagctgaaatgaggttactagggtggaccctaatccattataactggtgtctttataggaagagaaaatttggacacacagggagaaaaccacagggaggagatggccatctacaattccagaaaagcagcctcagaagaaaccaatctgcaaacatctttatctgcaactccctgcctcccaaatggtgagaaaattaatttctgctttttaagccaaccagactgcaggactttgttatggcagccccagaaaattaatacagacagcaaacggccagatgtcccacttgaaaaatggatccaggaacagaaaagtaaatgttgtgagaatgacgtttgatggcagggttttattctgcagttgcctacaggaatgacaacagaaaacttaagatggtatgttccaaaataagctctgtagaaaaccagtgtgactgctactttaaagaaaaattgaggagtgttttacttccagttatgtggtaaattttagaataagtgcgatgtggtgctgagaagaatgtatattctgttgatttagggtggaaagttctgtagatgtctattaggtccacttggtccagaactgagttcaagtcctgaatatccttgttaattttgtgtctcattgatctgtctaatattgacagtgaggtgttaaaatctcctactattattatgtgggagtctaagtctctttgtagatctctaagaacttgctttatgaatctgggtgttcctatattgggtgcatatatatttagcatagttagctcttcttgttgcattgatccctttaccattatgcaatggtcttccttgtctcttttgatccttgttggtttaaagtctcttttatcggagactaggaatgcaactcctgcttttttttgctttccatttgcttggtaaatattcctccatccctttattttgagcctatgtgtgtctttgcacatgagatgggtctcctgaatacagcacacagatgggtcttgactctttatccaatttgcccgtctgtgtcttttaattggggcatttagcctatttacatttaaggttaatattattatgtgtgaatttgatcctgtcattatgatgctagctggttattttgcccgttagttgatgcagtttcttcatagtgtcaatgttctttacaatttggtatgtttttgcagtggctggtgccagttgttcctttccatgtttagtgcttccttcaggagctcttataagacaggcctggtggtgaccaaatctctcagtatttgcttgtctgtgaaggattttatttctcctttgcttatgaagcttagtttggctggatatgaaattctgggttgaaaattcttttctttaagaatgttgaatattggcccccactctcttctggcttgttgggtttctgccaaaatatccactgttaatccgataagcttccctttgtaggtaactcgacctttctctctggctgcccttagcattttttccttcatttcaaccttggtgaatctgacgattatgtgtcttggggctgctcttctcaaagagtatctttgtgatgttctctgtatttcctgaatttgaatgttggcttgtcttgctaggttggggaagttctcctggataatatcctgaatagtgttttccaacttggttccattctccccgtcactttcaggtacaccaatcaaatgtacatttggtcttttcacatagtcccacattccttggaggccttgttcgtttcttttcattcttttttctctaatcttgtcttatcactttatttcattgagttgatcttcaatctctgatgtcctttcttccgcttggtcgatttggctattgatacttgtgtatgcttcatgaagttcttgtgctgtgtttttcagctccttcaggtcatttatgttcttctctaagctggttattctagttagcaattagtctagccttttttcaaggttcttagcttccttgcattgggttagaacgtgctcctttagcttggatgagtttgttattacctgtcttctgaagccgacttctgtcaattcatcaaactcattctccatccagttttgttcccttgccagcgaggagttgtgatcctttggaggagaagaggcctactggtttttggaatttttagcctttttgtgctggtttctccccatcttcgtggatttatctacctttggtctctgatgttggtgacctttggatgaggcctatgagtggacgtcctttttgttgatgtcgatgctattcctttgtgtttgttagtttccttctaacaggcccctctgctgcaggtctgctggagtttgctggaggtctgctgcagaccttgtttgcctgggtatcaccagcagaggctgaagaacagcaaagtttgggaaagtttacacactctaatgccctgctacccagcctttaaaaactgatttaaagattttaggaatcctagagaaaaacaaaccagtagtatcttattacaaagagagaaaagtgaatagtccatggcctcaataaacagtctttagcctgcagctgaactggcattccatggagcacactttctgacatgcatactcagtggttccttcaatgtgcagaaagtcagctggaaggggagttgagtttcaatgagaagtgaagcatgtcatgcatgggcagccagcaggaccccataagtctgcatgaaaatgctgcccagagcacaatttgcaattgcaaatatatggaaccagcccaaatgtccatcaatcaacaagtggataaaggaaatgtggtatgtgtgtgtgtgtgtgtatatatatatgtatatatatacatacatatatatatacacacacacacatatgttacataatacacacacacacacacaccatggagtactactcagcaataaaaaggaatgaaataatagcattggcagcaatctagatggaattggagactattattctaagtgaagtaactcaggaatggaaaagcaaacattgtatgttctcacttccaagtgggagctaagctatgaggacacaaaggcataagaatgatacatcggactttggggactcaggagaaagggtgggagggggtgagggataaaagactacacactgggtacagtgtacactgcttgggtgatgggtgaacctaaatctcacaaatcaccactaaataacttattcatgtaaccacacaccacttgctctctaagaacctattgaaataaaaaataaattaaaaaaaaagaaaaagattgcttttcagaatggagagggcacatttcaataattagcacagatgttaacagcagctcatacctgccacacagacaggaaattgcaacttctgtgtactggagctttgttcataactgttgtcagggttaacaaagtacctgcttaattattggtagctgggaatacctggggttgtgctcacgtgttcataggctttgtattcctcagagctcagagacgaccatgctcatgtgagaaacggcatggcgtgttggtagaggggagcaaagagggaggctgggggagcaggttgagaccagatgctgcaaagacaggaatcaccctcaagaggccggacttgctctggcagggagttgggagatgatgaaagacactgaggtgtaagggtggcctttggtttttaatcaaaaagaagcccatgccagcatctaactaagatcatagcaccaagggaaggaatgggaagcaggggagctagagagcaggtatagtaggagaaagttctgacccaaaggctttggccaggtttggggaatgcagagaaattcagggatgaacaggttctttgtggtttggtgggacagagaggaggatgcattgcctgtcacttgatcagggagtcaaaggagagcagagtttggaccaagagagttctacattaaacgccaagtgcttatgaatcagagtgagagtctcccttgctgaatctgcctcttttatcttggctgttccacaacatagattccattgtacaaatgatcatatagacattgtgtgatgttctaagccaaaaagtgactctggcagttccagcctgtgagtatcttttggcaacgttctagtgtgagaaggagttcctgtgcagcactgtctgtctgactcagctctgcaggaacggctggaaccacagagctcatgagggtacactgctcacaggcagggctcacacacactctgaacccagctcccacgcctgagcaggtcacaccaactttgaggcacttccccggccctaacatgttttaaaatttgaatcatgcttcaagtgactcttttgagattggcagtgatggaaacagtctaaggaagggaacttagttttaaaatagttttaattgtagagatgacaattgacacagatgtgtcaggaaaacatgttggaatgtctcgactggcagtggtaattctgtgagctcagttcacattccaagtgctctggcttctgacttctggcatttaggaacctgagaaacatatgaatctatgcacacgaaaaatccaggcactaagaactcagccttgattagccataagtgtgctctctgtagaaggggaaaataacattgtaaggaatatgtttaacctatgtaagaaaatacatgattttaacatgaaatataaaaattggtggcattaattgtagtcttttttatcagtccattgaagttggctcagcaggctctgtttctcccactcttctctggcatcacatttaattgttatgtgtagtgtaaggtctgcagaatgaaacagtcctccttttcaaatagtgtctaatgtgaacctcagtgatccagactggcctctgagaagattgaagagttttcgaggacaacgatgtcttgaacgagccacaaggaacactccaactttgtttttagatgaatttccacgtttttcttctgcaagggtttcggagaggtagcatgacagacttctttgtacagaatgttttcagaagttgtgttaatggagaagtttcttttggggcttaagtttctatttaccttttgtgacatggtttttaaaaaacagcaaaacaacctcattatcttcctctcccacaatcgttgccgtagaaaggagataaggcagatcccacgtggactggtggctgggtgcgctgccaggatagctaaggcgccccttttacaaacagtctttgacatgcagtcacacccgcaatctcggtgctgggtgataagaaggattgtattcattacaccgttgaatacagaaacatatttctgaaataatttttcttgtctagaattccgcagaattccgctgagtggcacattcaaaagaatttttattaggagggttccaatgaactgctcagcggcagagggactttatatttaatttgatttctcagaaccaggtattgtggagaaaggcatcagataaccacggagtgctggttaagggagggaagcctcactaagcagggttcatgcgttcaagccccgcagccaacaagcattctctgagactctcattctggagtgggcaccaaggtgcctcgaaatcccagtgggttcatgaggcttcccgcctcttgtctccttgcatttggttacagagatggcacagtatttgttattgaggctggatgaaaatcaactgtggccagaccttcacaacccacgtatgggcacaggacttgggtgtagagagaaaccaagtgaaaagtttgtagtaaaaattttgccactgtggagaattccccttttctcattttgctttggcataaacaaagatcttaaaaaacagtttaacagcacgttgggaggctgaggcgggcagatctcttgaagtcgggagttcgagaccagcctggtcaacatgatgaaaccctgtctctaccaaaaatacaaaagttagcttggggtggtggcatgtacctgtaatcccagctactcaggaggctgaagcaggagaatcgcttgaacccaggagatgggggctgcagtgagctgagatcgtgccactgcactccagcctggatgacagagcaagactccatctcaaaaacaacaacaacaacaaaaaagtttaaaatactagaaagtcccatgagactatcgtgagcacctttgcagaaaaacaatctagtggtagactctgaggctggtcagtagtgggttaatggtggcccctaaaacaatatggccacgtcctaatctctagagcctgtgggtgtgatcttatttgcaaaaagtcttcacagatgtaactgagttaagggtctcaagagaagtagatcattttggtttaatttatgggccataaatcccaggataacagacgcagaagaaatgagggccattgaaagtggaggcagagactggagagaagctgccccaagccaaggggcacctggagccaccagaatctgaaagaggaagaaagagttcttttctagagccttgggagggagcatggccctgccaacatccagcttctggtgcccagagctttgacagatcacacttctgtcactgaagccacgaactgtgtaagaattatccaacagcagtctccaagggtgcaatggttgagtctgcaaatcacatttgagagtcagaggatgtcagagctggaaggggtctcagtctctgcttaaagagaagatgttggacaagctactcccttggacctgaattctaggcctgccctgacactcacaggctaagtgctttttcgagaagctggtggatccttttttccaagttgctctggcttagtctagaaagctctcaggatctgaccccaattgcctccctctgtaacctcaccttccacccccaccttctggccctccggccacaggaactcttctgaacatgttctgatcctgctgttcatatacttgtctctatatcaggctgagagagggacaaggcatcctttaaacccagattcctgtccgggggccttgccctgatcctccagctggggtcgctcttccccctgctccctctgtgcattgtacgcactgtggattctgaccacactttagggctactcacgaggcccagcagacctgcagggtctgcctccaaccttcctcctagagtgacctctcatcactcccactgcagcccctcagatgcacctggacccctcctgccacggggccttcgcacacgctgtgctttccctaaagtcctctactcctgtttgcaatggccttggattatagttaaaatgttccatatctttgttgggttatttgttcaatgtctgtgtcttcactcggcagcaagccctgtggggcatagattatgctggattttctcctggtgtagagcccagtacatagcagatctaacaagcaaagactgtgggtgactatatgttagatctataaagatgatactccacaactttaggagctcctcaagggtagggacttgttaattttatatctctggtatttaatagagaacctttgtagaaaccataaactttgatgcaccaaagtctctagaggccaggcacagtggctcacacttgtcatcccagcactttgggaggccgaggtgggaggatggcttgaggccaggagttggagaccagcctgggcaacataatgagactccatctctacaattttttttttgaattattcgggcatggtagcatgtgcttgtagccccagctactcaggagactgaggtaggaggactgcttgaacccaggagttcaagggtgcagtgagccatgattgtgcctctgctctacagcctggggaatagagcaaggctctgcctctttaaaaacagaaacaaaaacaaaacaaaaaaacaaaaaaacaaaaaaaaaaaaaaagaagtcaccatctgtgaagagcttcttcttgccctttagatatgacaccaacttctactgcatctataaaccctcatgttccctctgctcctttagtttccaacctcatctcttgcactttcctttctgccagtcctgcttggcaaggccttcagcttttcacacactggcctctgccctgcttggggccttgagcaggctcttccctccccttggaactcttttccattcctttccctgcctctttgtgtcctggttgattcccagctgtcttttcagtctttgaatatcacttcctcagagaaagctttgctgaccttccagtctagcttctggtggctagtgaccaccatctagttttcctgcatggtttacagaactcctagcatgctttggcatgcatgtcttctgttgaatgcatgccttccataagctcacaaagctaggcagagctggatggtggctgtctgatttcaaagatctctactcttggcacttcattacccaaccctccctgaaggaagggaagtgaaagaaacagaaaagcagaaagaatgcatgaagactctgtggaagagggccactgtaatgacttccaaagcccctgtgggctttctccctacctggcaggagaagcacactgtgccccggagagctcagggaggaggcaggacgctaggcatgactttggtgtgaccctgggttgtctcccagcctcctccctggcccatccacagcccctgcttgccatagagccaagtagcttccttatgcagtaggaactgttatccccatttaccagagaagcaagccaaggtgagcaatggacagacctggagctgccagcatgatcgtgtggttgcaaaccccgagctccttccaataaccgtgtgtcttataaataacggcgatggtgtgagctgtgtccagcacccctgaaaaaaatgccctagagacagtgctgtcaaatggatagacaagtagacagacagacaggaaatcatccctttgctaccacccaagacgttgcttcctctcagtctatttcccaaatcctcctctcccgcaccccataatcttgtcagagcttacctcctccctacgctctgcactttcattaatttcttatcacctatccctcagctgtaatctaggactttgtaaggacaattaattaaagtgagaaggttcttaaaaaaaggtattgacctgcaattcagccctttctttcagcaaaatcaatcttcagattacaggtcaagaggagacatctttaaaaacgtgtccagccaatcggttcttcagatgcgttcatgaagtcacacctgctgtgtatgaacctgattgcatgtcctgctttctgcctaagaaaagcacgcctaagtacacatgggcgtgcagcttgtttgaagaatctgttgctatagaaagataaaagggaagaaaaagataaaatatgtataaaaggaaaaagcctctattgatttatctatctatccattatatatatatgcacttctggtccttaatcctgggcagggtgtctgctgtcagagatgggcaaggatgggtgtcagccattggagagctgttccagggagggagcccgaccactctctggccttagccagcccagtcagcactggagaaagacctcatccaacgctgaaatagatggtgctagtgtatgcattacaatagcaggtgagtaaaactgtctgttgtacaacatgctgatgtaggagctttgtgattatctagcctaatgtgtagataaggaaatcagggccctggcaggtcgctaggcatgactttggtgtgaccctgggttgtctcccagcctcctccctggcccagggctcggtcttgctgtatgtggtccattcccaaaactgaaattcaggacctctgtcacccaggctgggctctgtccaagacaagctgccatttctcagaggagaaattgagagaagcagccaggcatcttcctgtctgaccccaacactggggttctaatctcccctaagctcacacagcaactccccaaccacttttgcagagagaacaaaaagacagatgttgatttacccggagagcatctgtcactaatagtaacacgcggctttcactgagggttaactgtatccaggtgtggttcttatcttcttacaagtattagtgcatttacaaataaagtgtgggaggcttagaaagttcaagtggcttgtctcagctcacagagcaagtcaaagttggaaccagaattctgggattagtcctgtgttgccaacaattctttattgcctcaacagacaaggttaacattaatttgaattacttgagctaagctgaatgacttgattcctgttccttacattgatgtggatgccaagcctgtgcctgaccattgccaggagcttaagggcagagataatggaacaaagagaagtgtatggcagcagagtacagtgaacaaaatttcccgcttaggttaaacggtggcacagttgtgttctgccgcatctcgagaaaagttacttaggctccgtgatcatcagttttcttatctctaaaatgggcatagtaggattaacctcttagggttcccagggatcttgggttagtctgcacacatttccaggaacatgccaggcacctggggagcagcacagctccttcacaaggtcctccatcatcatgaatggatgttagtaatcatgactgacacagatgctgcctaagggatgatgatggtggtgatggtggtgatgaaggtgtggttacgctgctgctgtgacgatgggatgacagcaaggatgcagaagaaagaacacggctctgccatgtcaggaccatttaggtcagtggttccgaactaggagtgatttcacccacaggggatgtttggcaatgcctggagacacttttagttgttcacactgttgagggaggtgctattggaatacagtgggtgggggccagggaccttgttaaccaccctgcaatgcataggaaagcccctgcaagaaagaatgatccagccaaaatgtccgtggggcccaggtcaaaaggccctggtctacgaggacgggaaatctgaacactggaggtgagtgacaaagcttccaggagccttgttgactacttaacatgcctctttcagctactgctttgaactgtacaggaatctgcgcctaaaaggaagagggcagaatgcccgacagttgggaagactatagtgaagccattccgcgggacctcctccctctacttgcagggcggcctggtgcagctgcgtctccagcccctccaagtccacgtggaaactgtcccctggttttctggatgtgcaagaaggcgtctgctggagcagtcttgctctcccaagcctctcacgctgtcatgggtgcacagaagcagtgggggagggggagggcatgggaggaggagagccacccataaatgaaagaacagtggagcatcgatcagcgctttttcgcagcgcgggagctgcttcgctgagccccagcaccgtcagacagacccctgattaaacatatgcagctgcacggatggatggccctgctcagctcccatcagcaactctgccagaaaggaagaggcaccacggaagttgtgaaggggcccagggctggcggctgggtatctggagggctggcaccctcttccttccaccagagctggctccaaattccagactcaaagcagaaagtttattctatgtttttccaggagatggggcaggttggagatgagagcaaggggaaggcgcgattccctgggaatgccctgttgttttcctctctgggaggccttggggtgcaggttccagatactgccctggttcttgttatagggacatggtgagtcctcaccaaattccaaatgcctccacagagagggaggctccgtgtggtaatgaagcctgctctgttcatttcgtcatttggaattctcttggatggcctgtgagttttctattatagaatcaaaaccacattttcttaaaacatgagaggctgtggtctattctgcctgagatccccatgtgatgccagaggagccacaactcacaggccctgcatcacctgctgctgtgtgcggatgaggaagtctgtcttcctggagggggttcttatgagcacaaacagtgatgaacgacgttaaatgcatgatggaaaactaagccaccacagaaagctggctgctcaccccacagaggcacagaaagctggctgctaaccccacagaggcacagaaagctggctgctcaccccacagaggcacagaaagctggctgctcaccccacagagggagagcactttgtggacaagacctgattcttccttccttccttccttccttccttccttccttccttccttccttccttccttgcttccttccttcctttctttttctttctctctctcctttctttttctttctttctctttctttcttcctttctttctccctttctttctctttcttcctttcttccttccttctttttctttctttctctctttctttccttctttctttctttcagcaaaatctcactgtcactcaggctagagtgcagtggtgggatcacagctcactgcaacctcgacctcctaggctcaagcagttctcctgcctcagccttctgagcagctgggagtacaggtgcacaacacctcacaaagtttattttttaaagtgtttggtagagacagggtcttgctgtgctgtccaatctggtcttgatctcctggcttcaagcaatgatcccaccttggtctccaaaagtgttgggattacaggtgtgaccgccatgcctggccaagacctgcttcttaatcattgctggagtcgtagagcctcacactgtgccatccatggtaccatagagagaaaggaaagcacttataaatgtgtacattaccaccccagctgcctcccagggaggtgaatccctcatcaggcgccctctgctgagtgagtgatggctatggagatggcggggaggtgaatccctcatcagggccccctgctgagggggtgatgagtatggagatgcaggagaggaggagttggtacagagctgaattttccaacacacaacagaaaaataaatgaaaagtaaggcagtggctaatacagggttggggtggggccaggggaaattgagtggctggcagacgggtagcaggaaaggggaatgacgggggctgcaatgttacagggcaggttctgaagttgtctgacaggcggtgagtgatagagacctttttctgggtctcccagtgaaaactttggtaaacacgtgactgccacttttttaaaaggagcttgcatttgggggctgcaaggttgccgcaaggttagacccgagggtgcccatgggagacctgccacagccaggctgcatgggaagagggcacttgcttcttcccacagctgcgctggtacaccgcagcccctgactcaggtccagagtctgacactgccaggttcaaggttggactttacccctggcccagatctcccacgggctatttattcctatctcctttgaaattcagcaacgtattataccaccttgaagaagatggggcagagcagaggggaggctagagggacaatcccaagcagagtcctaaatctacatcagattttccttttaaccaaaacctacttggtattcagcagaaattttgagtctagtgtttgacataatttaatagtatgcgttaatgactataattttcccctgtagtcgagatactaagaaaatgagaagtgctttatctacaccacacacaacagtaaccaggacagacttggaaatgacagtgaagaacaaagtctgtgagggccaatggcttgtggggaacttcagagacacgcagcactccacgcagaaagcacattccactccagatataagagggtgggaggctcactgatatttgttatgttcttttacactgaccacattgccgggtggtgggtaatactgttcccattgtgctgataccaaagctgaggccagaggggttaagagatggtctatgtccaggaataaaattcagatgtcgtaagttcaatttattttattttattttttatagacagagtcttgctctgttgcctaggcaagagtgcagtggtgcaatcacagctcactgcagcctcaaactcctggcctcaagcaattctcttgctaagcctcctgagtagctaggactacaggcatgcgccaccacacctagttatttttttcatttgttgcagaaacagggtcttgctatgttgaccaggctgatctcaaacttctgacctcaagcagtccttccacctcagcctcctgaaacactgggattacaggccagagccaccatgccaggctatgaagttttattttaagtttcgagatgtggggatttcttttttaaagcagcaagtactacctgaactaaaacgggtgattttgcaacttgctacggattatggaaatagttggcatctatattggtgaggtacccaccaaaactcaaacagaaggaatgccattttggagaacgaatctcaactttaaccttctttcatccgtgggtaagccctgcttttaaaaaatatataaataataataatttatttagggtaagaatacatattacctatcagaaaacatttccttctgtatgttagcttacccaggcaaatgaaaaccttagtaaaaacatttacacctacgtctgtcttctaaactacacctgtgtgtgtgtgtttgtgtgtgtgtgtttgtggggcggggtccaactttctaatgtacaagactctgaggcctggattgtttattgtcgtaaattgagttacttcttcttttggaaaaaatgtaaatgttgtgattacagtcttctttaactttcatgtgtttgacttgcattaattatatattggtagaattaaatgtttcacagtctgaatttggacttttgcgcatcagttgacaagtgttagtagctttctcaggtgcagcaatgcccgcctcctaaaggtccagctcagtaagccagtgtttgtgccactatttatgtgtctgttattttatgcttcaaaaaataaattacaacagaaaaatgaagctgctgatactagtaacaaagatgttggtcccatcactgtaatataattaaggccgagatggaattgatcaatgagcggcatgcataagtctccatctcaatagactttcagatggttgcattataaaggaaaagaactagattcaatgaaatgtgttaaatattgtgcctgaaaggcacaatgtgttcagatattttaagctagttttcagtctctggcaacagagcacatccacccagctgccaccacagctaaaagtataatactatttgttttgaaatgtcttttatgcatgctttcaagaacacattatatacaaaataagtgtttctaatgtgcttcactcttcctgtggcctcccagaggccaaaagccacattcgtagcccagttttcatgactgtagaggccctgaggccctgaatgtcatctcttccccactgctcactcctttaactggtgttatacctcaactctactgaacatttcctttgggccaaatgttttagaactccactgtcttggttcagtataaatttgtgatcttgtcaaatcctcttgtgtagtgaggtggggaacaggtgaaggcgtgggaagatgctgagcatgtatcaggtgctgtgtgagtgaccgtgaatgctgggaggatgctcctgcccattctgccataatggcggaggtggacaagcagacatgggtgtgcagtgagaccacatctacagcacaggtgtgcacaaggtgcctggagacctgcgagaaggatgtgtaaaccagcagctagccaagtgttcctagatagcaaaactcaaagtatcccttcagcatggaatatcatctatctaagaagtaaaaattttcagttgagtttagtgtctggttcagctgacagagcaagcacatatttatttcctgcagtggactgaatgtgccattccaaaattcatatgttgaaatcccaaacccccacatgatggcagtaggaggaggggcctttggaagttaatgagatcatgaggatggatccttcatgaatggattagtgccattatcaaagggaccccagaacactctcttgccttctttctattatgtgaggatccaatggtagctcagcagtctgcgccctggaagaggccctcaccagaacctgagtgtgctggctccctgctctcaggtttctcgcctccagagctgagagaaatgcatatttgttgtgtaagccacagtaatttattatttatgattaccattatttatttatttattttgagttcccaaatgagctaagacattttctctttctctaaacaacaggagtaaagagacagaaagggaatgaatttccaagaagaccagcgtagaacggaaaaatatcagaggagggagaattgttaaggatttccagtatctcaagtgtggatgctgtcctgagctgacccaaggctctggaaaggtaggagctctcttttgggggaagaagggaagaatcccattcctgaatgagcaggtgcagacacttgcaagataagaggcacacacagagatgtttacctgaagaactgcctggtggatggctaagaaagtggccctgcctaacacacacgtacggagagacggagtttgcagcaagacagtgaattatctgcttctcagtggtggcagggccctgtgagtagaatccttacatgtcctcttccatgggcttgtgggataagagcagagcagcctgtaggcctgtccatccccagccttgaggtaaatcccaccagtgaacaagatccacccatccacccagagctccctattagccttgtgagagaatggccagaaataaaacagaaactcctttattcacaaatccctaatttataaatactttgaaacaatgaagaattgccagctgctgtggtaaacagagcacagaagagaggtgagtaaaggttctagttagcactcgctgagcactttgtgctggcacttttctaaagattttgcaaatgttaactgatgtaattctcacatccattctctggggtggttttctttttctttttttttttttttgagatggagtctcgctctgtcgcccaggctggagtgcagtggcgtgatctcggctcactgcaagctccgcctcccgggttcacgccattctcctgcctcagcctcctgagtagctgggactacaggcgcccgccaccacacccggctaattttttgtattttttagtacagacggggtttcaccgtgttggccaggatggtctcgatctcctgacctcgtgatccgcccacctagccctcccgaagtgctgggattacagaggtgagccaccacgcctggcctctggggtggttttcacaaaggaggaaaccaaagcacaaagcctaggtggctcgctctaggtcaacaacaagccaatgccagagctgggatgagaacccaggttctgtgtctgtcatgaacatacactgcgtggctctgaagagaacagagaaagtcaaaaggagataatttcttatagactttaaataatttttccagagaaattcaagaaaacatcacatccatagaaacaaaacaaagccaagttgctatataaaagaaacaatatgtaaatgagaacaaatcattggaaatgaaaaatacgacggccaaaataaaaatgcaattaaaaagttgtagaagtcatcaaatctttcaaagtatagagcaaaacacaaaggaatacaaaagaaaaataaaatttgaggagcactggcaataaatttattgagagggcagtcgccatctaataaatgttctagaaaaagagaagtggaaaaaaattagggaggctactgcagaaaaagaatactgtttcttagaactgaggttctgagagtatctgaggttttagatttaaaatgtccactgatttcttggtagcatgaatacaaaatgacctagacataaacttattcccaggaaatttcaaagcaccaagtgtcaagagaagcttattcacttccagaagtgaaccagaaacttcagactggtacagaaatatttcactgccactagtaggcatgagaaggcagagacatgatgttgtgaagaaaaattattttgagcttgggtatttccaggcttccctgttcttgccatcctgctttgtgccccgggagaccagcagctatgtgttaccttgccctctggctttcagttgggttgtaaggatgagagacaaaagtagaagactgagaggagaaagagaatgaagtcaaagtatgtatcccctccttatgttcctgccagagagttgcagattggctgcctctctctactcaagaccacaggtcaaaccaggaagccctccctgttcatcttctctctctttgggcttgcagtggatctgccatgatccctttgattttcctaaatgttacccacatcttgtaatacccatatctttccttatccaaatttgccctattacatagttaggggaactatctgagacagataaactctgataaagagtgtggaatttcaaatctagaaattcatactctctaaactattaatagagtaagaaatagagatacatgtatattacctatggtcatgaaaataactaaaacgataactaaatataaaattataatgtcaagaaaatgtataaggaagacatgagagggaactagagtagtgtaaagagataagttatttgtctcccaaattcaagtgaggaaagaaaagaagttttataggaggaatgcaagccctttcaaatgatcaggcctagagagacgtgaaaatgagacagcaatcacatcctactcctgcctttaagctatgtattcacctattgaaacagcttgctattgtcacagatagctatgaattaaactaataatgcttcaccagacactgtattccacaccccacagtgtaaagaatgtatagctgatcagagatcagttttatttctgtaaaccaataagaattcctcacagaaccttgcaccaacactctctctgtctcccgttctctctctcctttttttcctttaaaagcctgcctgtaacaaaggccaaataaagctcatatccaaggttacttggacctgaacctcctgggcagctgtccttatcttagaatgtgagctaaagactcacaaggctcacaactttggaaaggagatctttatttctcatgaaggcctgcaacctgcaggctggccatcccacgggctgggaagtgtagcctccagccaaagcccaaagcaagcatgttgagggaggtgtggagggaacaggaatttaggctcaacaggctggctaaacataagtatttaacaagctataggagacatcatgaatatctgtgaaaggagaaacaagcacatgtgcaactgagcttcatgcttcttcatgggtcacatgttttaaaaaatggtgatgttggcatgatctaagagtggatatctgggccctcagatatccaaaaggtgacacagagaaggacacaaaaactctcactaagcatcctccacaaattggccaaaactagtccagagatggtcagtttttaggtggggaagcatcgtgaaactgctgagctgttgggtcaaatgtgtctatgtcaaatgaatccagttgtagcctcagatgactggctaaaggtgattaaaaaatgagttgtctgtttcttgctttctagagctggtttctgtttactccttaggaaggaattctggttaaaggataatgaggaagggacttactgaggcgtgtctgacctcccatcccatcatggccaggaacccagtttttaaggtttatctgggattctcctggccaacaggggaatccgtttagtccactgagggacttaggatttttatttctcagtctcaagtaaactgtttaaatctcattttgcatttcattctcttctttttaggtgggcaaaagagaaaaagtaggagaattcctagaatttatatttagagtaagtgagcagcagtgtcaatgctaaaaaattatatggttatcctaaaaaatttctttctgcaaagctgtggctgagttggtaataaattattaaccactggaaatgacaagatgtgtaaaaccaccctctattttttaaatatttggctattccactcctcccataagcttcctttgtcccaagattaattattctaaaatggttgggccatttctccagaatacagaatatgttagctgtcattattgcagacttgtgaaatagtagcgtttgaatctcttgtctgagcacggctgtgagaggtattcagaggattctgtgggcaggtaatgttttggtttcatgagcaggagcaaaaatccagaaggctttaacacttcagtgcatcccaaggcacccctattgagtattgtatagaggatctcaaaagataacagccacctgaggaaggaaagcagctcatagcagactgagctgtgtgaggtctgcgaaatttatcaggcccagagaggcatgagctttggacttcagtccttcccctgcatccattcccaggggcaattattttaagacatttttgttcctgagtagccgcccagcccattaccttcatgttcctgtaatatatgaagcaaagaacaatgaatagccaattaataacatattatttcaatgtaaactctagaaactatctctttttttccttaaaaactcacttgtaactgctacagtgagagtgtatattcaggacaacttgaatctatgttcccaggtggccatcttcaagctcagataaactctatacttaatcataatttctgaatcccattgtttaaggttggtacaccacaatggcctagcatccttctgttccatgagagcaatagacaccattcaaagggctattcctctccactctctagactctctttgtaccagcaagttaactgttgagcaattctttggtaattaaacaatcattacagcattattagctccacactctggatgacatctttaagcctctctcatgtgttaagcatgtctaatgtgtttttccacttttggataacttaagagaccaaaatataccacctcaaaatatgcctctttggcataagcattattttgagccaactatttttgagaaacagcagacaccggagaaacagagtagaagttactcttttgcaaggaagacttacttctataatgaaaatctccttttgtaatgataccttcctttcagtaccaggaaggaaaggatggctaaatcacaaaagactcatctatggagaaagcaccaatttaaatctgcataacaaacctcacccttttctatcatgctttccctggtcacctccccaggactggcttcccccccagtcttctttctttgttttagatgaagatggtatttaagcctaaattctaagccatttcttttatatttccccttttttcctgagtatctcccatgcacacctaaagaatacatgtcaataaacttctgtttgttttgtcctttttttgtttgtttgttttacaggggatcctagctaaatagaagagtagaggaaaaacgactgtttcaacccttaccgtaatcaactttattgtgataaagattcacatattttgcaatatgtcttatctttatggaaattaaaaaatccaatcacagaatcaaaacttcagaaatatagccaaatataagtggaaatttagtatacaataaatgcaacatctcaaattagtggagaaaaatagaattattaaaaagcagtattggaaaaaccatatacctatatggaacaagataaaattagatctattcattacattcaataccaaaaaattctaaatatatcagatatttaaatgtaaaaaaaagcaacaaaataatttttaaaacttcgatgaacttttctattatctaggaataaagaaatgttttcctaacataaaattttaaaacgtaagagaaatgtttagtaaatttaaataaataaaatatttaagatcttagtatgatcgtgtcagaggcatttgaaccagtgtgactccatcttgagtaggggctgggtaaaataaggctgagacctactgggctgcattcccaggaggctaggcattcttagtcacaggatgagataggaggtcagcacaagatataggtcacaaagaccttgctgataaaacacgttgcagtaaagaagccagccaaattctaccaaaaccaagatggcaatgaaagtgagctctggtcatcctcactgctcattatacactaattataatgcattagcagtctaagggacactcccaccagtgccatgacagtttacaaatgccatggcagtatcaggaagctaccctatattgtctaaaatgggaaggaaccctcagttccaggaattgcccaccccttttctggaaaactcatgaataatccacccctttttagcatataatcaaaaaataactataagtatccttagtccagcagcccaagctgctgctctgcctatggagtagccattctttattcctttacttccttaataaacttgctttcactttactctgtggattcaccttgaattctttattgcttgagatccaagaaccctcttttggggtctggatcaggacccgtttctagtagcaatagaaaaaataagcaaatagtcaaatggcaaaacaggataaaatatttgcaatgtatatttcaggcaataagtgaatatacctactacataaaggactttttaaaatgttggggtggggaactaattactttataatagactagaattatgaacacacattccacagaaacataaacacaaatatctccttaaaatattttgaaaggttaaacttaactcgtaacttggaaatgcatattaaaagtgtactgagttttgtgtcatcagacaaaaaaaaatctaaaagtttgatgacatatttggttggtgattctatgagaaatgggccctctgataaattggcagtgtaagtgcaacgtggcacaacccaggaaaggaaaatttggcaatatatagtaaaaccatgtatatagttatcctttgacccagccatcccacttctaaagaccttgcccaaagatgtactgggaaagaaaaaacaaacaaacatgaaaagccatgttaaaaggctattcactgcagcactattagaaatagcaaaaacccagatgctcaccagtagggagtcggttgtacagagtacagtgcacaacacaactgagtaccatgcagctgtgaaaaggaatgagggatctcttcatacactatatgcagtgacctccagaatattgtcaagagagtcttaaaaaggagagtcatgtgctagtatgctgtcatgtactaaaacagaaaaatacgaaaactaaaaaggggtgatatctatatattcatcaccccctttaatatatagatatagacatagatcaatgtatgtatatatatatacacacacatagataatgcatgtgtgatttccttatattaaaaaaggaaagataaaaatggttactgtatctgccaactatatctacaataatgctacgtgacaaactaccctaaactcactagcttaaaagaatagccatttactcccaagttcccaggctgtgggtcacactgggtttgtcttctttctttgagatgtgagtctagggtccgcaggagaagctttgctttaggctgtgggtcttcaaggcagcaggtggagctctgcttaggtgtctcacttggggacccagctgaaagacagggctaccagaaatgaaactgcctttgcaaagatgatgacagtgagaaaagtctagcatggctgactccatcttgcttccagcctcacaggttggctgtctttgctcattcctgcagaggccaagctaaccacaggaggaatttagtttatagtttaactttgaaggaaggataataacagtctctccctaaaactgattcccccttgtttaggggctgaaaccacctttgtaagactaacaaaaggccacaagattatgggagaagcctgaattctgctaggatatagttgtagtttctataattccttattgctcaggagtcatgtggccagaggtcactagatttgtaacttccccagttgctccaacaataccactattatagaacctaagattggtctcttgatatattttttagacttttgcattctggcaacagactgaccccacctggacttgtgactcataactcaaccggtcctatggcccctacccagaggcagacacagcacatgaggactgttttccacacacctatgatttcatcaccaaccagtcaggggcacccattccctagctcctgcccaataaactatctttgagaaaccctaacctctgagccttcagaaagactgatttaagtagtaacttcagttctcccatgtggtcaacctcgtgttaattatactctttactgcaacttcatagtctcattggactagttttgtctgtgcagtagacaggaagaactcatcgggcaattacagaaacacagtcttcctcatggcagaagcagctcctggaagggttaatagaagcatgacacactaagggttgggtttagaacacacacagtcacttctgcctgcattccactggcaaaatcaagtcatcgggcctggctcaacattagcagggtagggagtacagttctttcatgaaggtagggtaggggaaaggggtgaatatttgtataatgataatataatgtaatataaataggtataaggaaggtagaagattgaaagcaaaatcaatgttcttaattgtaaattcaatgattgacataatccaggggtggtaaactgtgacctgcaggctaattccatcccaggtctctttttgtactgcacatgagctaagaagaggttttacattttttaaaggctttgtggaaaaggaggaagaggagaagaaacagagactatctgtggttcacaaggcctaaaatattaactgtctgactctttacaagaaactatttgatgactcctggcataaccatgcacagaggaaatattctaaatgcttttgaacacaataatttgattgcatattcccagtggaatctactttctgataaaaagaactttaaaaaagaatattaaactgttttccatcatatttttggtattagcaatggtattgttatgagattatcatatatgtaatatagaattaagcaaatgattaaccatgtggtttttttggaaatttgcatttttaacattggggaaaatacagatataagatcaataaggtaaagtaaaaccatgtagtcttgaatttgagttaagagtagcagtgtgacctcattttatattttatcttaacatttttttttcctggatccttgaaaacaatgacaaagcaagtatcctaaaccaatagaaaggtagcccatgttcctggtttggaagactcaattatggttaacatgccgtttctccccaaatttatccaaaattcaatcagtccaattctagcatcaggaatttgcagaaattgacaagcagattctaaaattgatatgaaaatgccaagtacctgaaatattcataataattttttttaaaaaagaaacatttagaggattgacatctgatttgaagacatatataatatgtattgatataaagctgcactaatcgagaaagataatatttgtgtaaaagataaaacaaataaatctatggaacagaataaactatccagaaatagatccacatatgaatgatccaatgatattcaacaaggatgctaaggtaattcaatggagaaaagacagtcttaacagcaattgctgccagaagaactacatatccatatagaaaaaaatattaatctttcctttacaccatataaaagataactcaatgcatcatagacattaacttaaaaactaaaactataaacttctgaaagaaaacctagggaaaaaatctttgcaaccttggagtcggaaagttttttttgataggaaacaaaatgtatacgtttcaaaaatctgctttttgaaagacacctgtgatactggtcttcaacccggttttctgacatacaactctttttgaagattagaatctccaaaatgatgtcttttgtatgctaatgagttgactggtagctgggggaccctaggtagcttcagaatgggggcagttatcagaaagaccaaggcagggttccagggtcaggacttttagccacaccccacaaccactgggaagagaagagatgctgagagttaagttcatcaccaatagccaatgatttaattaatcatgtctatgtaatgaggcttccattaaaacccaaaagaacaaggtttggagagctttgatagcggaacatgtggaggttcctggagggcggtgcgctcagggagaaagtggaagctccacgcctcttccccactacctcgccctatgcatctctttctctttattctttgcaatatcttttataataaactgataaacataagtgtttccctgagttctgtgagccactctagcaaattaattgaacccaaaaagggggttgtgggagccctgatttatatagctagtcattcagaagttctgaaggcccgaacttgcaactggtgactgaagggtgcagtggtccccctcacaggctcagtgactgagctcttaacccatgagatctaaactgtctctaggtaaacagtgttgaatgggaggaggcccagctcctgtccactgcaggcttgattacttgctcactggtggggagaaattcccacacgtttggtcacagaaatcttctgtgttgattattgtgtggaatgacagcagaggagaaacagcttgagtttttccaccttcaacaccatgaagaaaattaaaaggaaagacccagttcaggagaaaatattctttaaacgttcatttgataaggaacttgccttaagaatatatgaagaactcttaaaactcaatttaaaaaaaaaaactttgatttaactttgatttttttttttttttttttttgagatgaggtcttgctccatctcctaggctggagtgcagtggtgcgatctcatgatctcagctcactgaaacctctgcctcctgggttcaagcaattatcctccttcagcctcctaaggagctgggactacagacacatgccaccacgcctggctaatttttgtgcttttagtagagacagggttttgccatgttgcctgggctggtctcaaactcctgtgctcaggtgatccacctgccgcggcctctcatagtgctgggattacaggtgtgagccaccgtgcccagccaaactctaatttttttttaatgagcaatggatttgaatagatactttactaagtaatataataaacagcaagtaagcacattaaaaaacctacaatcagatgatcttcaatgggtgaacagattattagcacatgatggtacatccataccatgaaatcctactcaccaataacaagaaatgaattattgacaaatgcagtaacttggatgaatctccaggtaattctgctaagtgagaaaagccaatccctaaaggtcatagactatataattccttttgttccatattcataaaatgacaaaattatagaaatggagaacagattggtggttgccagggattggggacttgtgggcaggagtcagggaagtgtggctatgaaagggcagcaggggggagccttgtgttaatggacgtgtttggaatcttggctgtgctaatgtcagcttcctggctgtgtattgtactatggctttgtaatgtggtaccatggggcgtaagcagggtaaagggtgcacaggacctttctgtatttattttctaaaacttcatgtgaatctacaattatcttgaaattaaaaatttaattaaaaaaagccttgcacataaaggggaaaaccaaagcatgtgtaataccttccctataggcacactttctcagtggaaccacaaaactgataggggaaagtttcgttttatgagcatattccagctgacaaatgaagaaggtgcgatgagactagactatccccatttggaaccttctgtgaggtgacagattatgatgtaatcattgatggctgttaacatcacacaataaggccttatgaaactcacacagcaccacctctaaagcagtcttgtcacaaaatattaaacctggacctgatcaagcatctggactggcttatggatatagagaaaatgtaggggatagatgagcacgggaaatgtctccgtggggcaaaattcacgaaattcagattgttggacactctccaggacaaaaggtctagattcttcaaaaacaacaacatcgaaaaaaaaaaactgccagaaagaaaaaatacagagggagaaggtaaattaaaagaaacataagagttatacccatcaattacaatgagtgggtctgttttggccccaggttcaaacaaactgtaaaaattttaagagcagccatatgacaattgggaaaatgtgaacactgaccccatgtttgatgttattaaggaattattaatattttaggtgtaaaaaattgtattgtgggtataactttttaaaatcaggtatttgtacctcatttgtacatttgtacgtttgtacattgtacattttgtacaattgtacaaaaacatttgtatagatacatactgaaatatttatagatcaaattataaaaatctgaattggccattcatccataattgttgaagctgggtgatgagaacatggggggtcactatactattctctctacttttgcacatatttgaaatctgtagtaaaatttttattttaggaaacataaacaaagtaatttaatattccccatattggcctctgcaaaaataatatctcatataacttggggagcttggagctttttatgcatggcataaaaatgacaatgtacatccctctccctgcaggacacagaacacatttatgagtcttttcaccctcatttcgttgaagattttattggccgaagaaccctcagtaggcacgaaattcattctcacaagcagagagatgcattatgctccatttattgctcatcctaaattataaacatttccagtgaatgtaaaggaagatatgattgaaaaggactctgtgaagacaggatgtttctgtacagtccttgtatctgctcacctattccaaactttccagagattttaccagaggtttaagatattctcctgagggtttgctgtagagagatttttcttaactaaggagtgcaagtagcaagcaatagcccacccagttggagacaaaaaagaagggtgtcagtgttcccactgttaaaaaacaaaaaaaaatcaccctggacacctctgagaattatacaaggggatgtacacagccctgctttatttgagttcaaaaggaaggtgggttttgaaagaagaacaaggagagtagatctctctggatcttctgatgctcacagcaaagagctcaaggtatctgagtcaactcttgaggcttcttcgaacagagggatgaagagagaatatggcaagcttgccaacagatcccagaagttttaagagaaaagaacagattgctctttgcaaaacaaaccgagctgggtgcatggagccccagtagacagaaagtgaagaaaacatcaacgttctgaagttttagataggtgcaccatcccttatggataccaatctgtgctccccataaacttctgtgcccagggtcaactggccagggacaactggctcaccaggaggcctacatagcctcttcttcaggccctaattacagctctatgcaatagggactctgccatctgacagccaaggaggtggttcggtttctgcacatggttttttccgctgggtcccttgaggtccatggtaacctcttcctcattctctacaggcagatcacactttgtaataagatcagaggcagagaactttgaccagatcacactttataataagatcagaggcaaagaactctgaccagatcacactttataataagatcagaggcagagaactttgacaactatctccttgccctctggccctggggtcagggctactcaaacaacacctgctgtcccaaacccggagaagtgtagattttggcactggtagaggaataacagctattgttgacacttaatcttgtgggcctggaatttcaactatgttttcacaactcggagcctattgctgccacctctgtcagggaagataaatgggcatgaataatagacagatgagtttcccaaaagcccagacaggctgcagggaacacgtaatgagcagacagtgtggttcacgccggggagcccaggtttatccaggcctcatcctcactccctttctctactgataattggacccaacaggaccattccgaatcatttttctctcttcagttattcttcagttctactcaaagggtcagtttagggcataattaaagtcaattactttctgaaaggccatcaggacaactgttagagaaaatgatagcagccccgcacttgctgtaggaattattagcttgtcagcctccaggcttatggagacaaaggatcaaaaagttagagagatccaggtgttcacctatttgttcactaattcttttattgtgagtgtgcatgtgtgtgggtgggtgtgacatttattatgaaccagagggcaggagccagtgacacagtggtgcagagaataatcatattccctgccttcctggggtcatacagcttggtggaggacacagatgtgaattcggtaatcactccaataaatattctcctacagatgaagaaagatgatacgatgtgatggacaacagagacttatatggtggggtctgggctggtctttctgaagctaagactggcaggatgagcaggagtttgccagacaaagaggagtggagttgttttccaaacacatctcagcacaaagtgttgtctttgctgggagctgaaaaaagatagtgtgggcagagaccattaggtgagacgcttgatatgagatacaacctcaacaggtggaagaagatcatgagagatgaagagaggaatatagtacagcagagaggacacagaagctgacgtcagggtgtctcagtttgaaaccagtggccaccctgttcctctcccatgtggtcccatcatgggcctctagggtctgggataagaggttaatgaatatctcataccctaagcaggggtggtccctgcactttagcaaaaagttaaggaactagggaaaagagatggaaataataaagagatgggacaaagactttgaagaccaaagcccctgggctattctcttttttaaatttttttatttaaattttcatttatttttatcaagatagggtctcactatgttgcccaggttggtctcaaacttttggcctaaagcaatcctcccaccttggcctcccaatgtgctgggattacaatgtgagccaccacgtccagcctcctgggatatttctcaatgaaacattggatgccaagattggttttgtgccacatgccaatttcacagaagccagtctatgagccaccagctctactcagcaattacagtttctggaactttggctaaattcctgtagatgcaccactgcttgtggcctgactctttgccacccaagtgcgctcagcctcccctggggagtctgccaggcttgcatggctcccactgcacttgctgtgctgggaccgaaaacagtttttgtgcccctagcttaactccactggattcatagaggctttggcctcctcaatggctgtcctgggacagggaggctggttagcacaattaacacaacctggtcatgcaaggcattgatggtccgtaacatgaactttgaccagtaggagacagagaatggaaaaaagccagcagataaatcatctggccttcctcccctatgacagactgttctgagccacagtgtttcacatgtcttcctggagatgtcccacatgacttgagcaaccagctggagctctggagaaactgtggccatcctggtaacatatgaccttgtatttgctttctctccttcctgctttatttccctatgtcccttactttggttgttgggattgcacctcccaataaagcattagcatgtccgctctgcttggggctctgtttcctgggttaagactctgactcttgaatgctgaggcattgtattgagaaggagttcaggctggactcacacctggtgaacaagagtgctgtggtgcgtgagtgagttcttccacaggtataagaaaagatacttagtacctgccacccctgaactatccttttacggcaaatgtttgcttaaagtcagcagtcccctaaacatacttgagatcacagatgaagcaaaatcagactatctcccaacatagaaaagcacaataggaaagaaatatttggtggtgagaagattatagctataagcaaattaggcaatccatctgtgagacccagcatgcagtatggtagaagttgaaaataaaaacatggataaaattgcttaatggattataataatatgcatgactgtgtgccaggcagtgtactaagactttcttgtttcatcccatttgcttattataacagtactataagacatgcactcttacaaacccttattttacagaggaagaaacaggcccagagaagttgggtaactcatcaaaggtcacagagctaagagtggcagagtcaggcctggagcccaggaagtctggtttcgaatttcatgcttctaacctgagcactgtactgcttggtggagttctctgctagtcctacctttcaggcagaggtgagcattgctgagattacatgcctgttcctgggggctaataccaggagggagattagactgttctgtctaatctgtagtttggctcttccatgagtcttgggatcagaaccctgaatcagagagagatggacactggcctaggcagatgtgatggtctgaatgtgtttcccacaaagcatgtattagaaatgtaatccccaactcaacagtgtcaggaggtggggcttaatgggaggtgtctaggttatgggggctccacactcttgaatggattaatgtccattataaaaggacctgaggctgtgagttccatctcttgctttttctccgtctttcgccctcttgccttctgccacaggtgatgcagcaagaaagctgccaccagatgcagccccttgatctcggactgcccagcctctagaactgtgagccaattaaatttttcctttgtaaattacctagtctctggtatcctgttatagcagcataaacaggctaagatagtaagacagtagggaaacaagctccagatgtacttgaagtctcttgttcttattttaggagttgaagagcaattccctccagtttccattagaaatgcttcttcttccatatcaaatattgtgagatagcctgaaacacctttcaacactttactacccttctccaaaattcaacagatatgatttccacggactttactcacaggggcttcagtagaagaggaagaggcttgggtttaattgaaggtggcctgagacatctgtgaggaacagcccttttagagacatatcccctacaaataaagcatcagaattattatcctaatacatgaacatccatggttccttcagcaccatcgtaatgcagagaccatggggagatgcagggagagggctctgcacagcatggccaacttgccgggttgaaaacagacaacctccatggagcagggacttcaattagttaattccccatccccactgtcacttactaacatgggattctgattaaaaattagattctctgcaagaggcttaacttataatttaagaacttttgctgtataaccattgcaaaaacaattacataaagattaattagcaaattcccaaaacagtagtaaacggcaaagtagtttaattaaaaccattatctccaaaatctgaacgttaataacagttgtagctcagggagaaataagaggcacactggcacagagtggggtaaagggagggtgtccttcgacaccagcattcagtcagcccaagtctccacggctgctgtcctgttaattacactccagaactctgtggccaccgcgtcttgagaggccctgggctcctcctatgagcctctgcagctgtagccttgacgaacttgtcattgctggcctgcctccaacaagaggcctttagccctcagaagagagggaggcagcagggggcacgaacaagacttttaagtggggaattcataaaatttggaattgtcagaaaacatctgtaaccatgactcttgtccttcagaagacactgataaatttaacccaacccagaccccttaacacaaactctgaagtaaaagattggcaaaggaagcccatgagaatgaaatgtaacaatagcaactatgtagttagcacacacaccatatgatctcacacattcacaagatcctcatgaagccacatggccttcattctgttattatttacttatttatttatgagacagggtcccactctgttgccccagttggagtcagtggcacaaggcagtgtgcagtgctcagtgcagcctctaactcctggctcaagtgatcctcctaccccagagtcctgaggggctgggactacaagcacatgccactaagctcagctaattttttttcttttttaattttttgtagagatagggtctgactacattgcccaggctggtctcaaactcctagcctcaaatgatcttcctgcctcagcctctcaaagtgctgggattacatgcgtgagccactgcatgctgccatattatttttattcttaagctaaagtcactcacttagcctcgtgcatggggacccttctctttttaactctaaagcccatttgtttacctggataccacacagatgccctttgtggtgcaacatttagcccattgaaggctaattatgtgagtctcacaattgtgtgagtctgtcatgaagtatagcctagacttgacaatgattgatttctccaaagaaccccttcagcagggagatcccaaatcagagagcccttgcccttacccaggacagccaatgtctctgcagctccacacggagcaccagctaccgtggaggggttgacctgggcctggagtccaggacaggctgaggaatgcccttcccccagccctctccctgagtgtcagtccctgagttagacactgtcacaggagagggcttggaagccaccttctgactcaccacacccatcccagccatgccccctcaccctggcaagcacccaggggctgtatgttgatttgtctctcccctaatacaaggccctgacctccaccagcagagccagactgtctgcctgcaagcctggctttttattctgctgcactacagaaattatgcaaatcacagctattagtataacagcttttgcagaattcagaagaaaaaggcaaaaaaaaaaaaaaaaaccacacaatcacaaaatccctatgtttggttaaaagaccatgaatttccccattgtcctcactcactctcttgtcaatatgagatgtatacatctgaagcctgcttttcagtcttatgaacatctataaaagagacatcagtcagcagaaacctctggtactgcgacatgaaagagaatgagggaaaaacccaactctagccaggatggagaagagaggaaaggcaagatgtgggaggcagccccagaaggcccaggcggggtctctagaggaacctaagaagactctggtgtgggacaaagctccaatgtgctctgagcactctcgctgtccttccagagggcctcgttccccttctcattcatctcactcaccacactggaaggctcctgaaggcagaagctgcacacctgtgccccgtcccttccacagtcctgagcaatgagcagtcacagagctggggccgggggagggcatggagaaattgagctcctttgctcaccaacatttcagggagaccgcagtggtcttggtggatgtgaatggactgagttgcttctatcactcaaaatccccgaatgaacaggtggcgcatggacatcagaggattcaataacctgacaatttgcaaagatttcggtggaacagtgacaccagagggaggagggagcacatgattccaggcgctcagaaggaggaagctgcctcaagaggagggactcaggcagcccgaggtggccctgcagggaggacgcaggaggaatgaaggccctgtctccctcgtctctccttctgccctcctcccaagggcccccccgggagctgagggagcagaagcaagaaagccatctgggtcatccctccaggtcacctcccgaggcacagagcaaggcagaaaacttctgggccaggctctggcaggaccacttgcatttactctgtaagatgaagacaatggtcctgggagagcatagctgaccacctggcaccctgggccacatcgccttccagctctcctctcatctgaggtccatgccagctcctgcccctggctctggtgctgtcccacctcggggtcattccactttctgctatggggccctgtctgatttcatgagacacctctaggtctgcactaagacagcccagagttatgggcttatcaacgctggggataggcagtagcagatggtggataaaccaccctgccttccatctttcaggtggagaattctggaagacatcctgtccatgtcttggtgggtcctggtggacttgaacccctgctgtccatggcagcaacttaattcatctgccttccctgtctcactgtccttataccctcactctcatttcctgcagtcaccctcaaataagcaacctgcacccaaggcattttctggggctctcctttttgaggaactcaactaagtcaagtgaaagagccagtaaatggcaatgagacagttgatcaccgagataaaaaactataatgtcagattgctacctcttgccatacatacaaaccatttcttgatagattaaaaagttcagtgtaaaaacccaaagcctaaaatgtttaggagcatatatttatgagcttggagtagggaaggatgttttaaacaagacataaaaactgctaaccactaaaaaattgatcgtgattaagacctcataattaagagcttctgtttatcaaatgataccataaagaaactgaaaagcaagctatgaactagagaaggtatttgcaacactccaataagggatgattatttaatatatcctaataaaaatcaataaggagaaacatttttaaattgtaggtcacagaagaggataaatatattaaaaaactcaaaattagttatcagaaaaatgcaaattaagacccaaagtaaccatcaagaaaggcaataaaatgtggcagttgagagcaaagtcattatgtctggtggagttgagccctggcttaatcccatgggtgccagctatgtgatcttgctggcatcgcttccccactctgtggacaatagctttccatgcattaaacaggaataacagtagttcctgcctccttaggttgctgtgttacatggaagaagacatgcaaagctcttagcatgggtacttcacaaacagtaaacatgcaaactatatttaaaaaccatctccaggtgactcagagattacataatgggtgcttaataggagcacaacagtacaggtttttattttgtgtgatccaaagtactgcacttaaataacatgtgggtgacctccacaggaaggaatgggttctgccagcggtgggtctatgtaccgtactgcagcctcaaacacagacgaatgcgttagctgcatgtgagccctcatgataaaagagatctgaaaataaattgtgtatttaattcagagcgactccagagctgctgttctgggattgcagcagaaatcctggagaaagcctaagatttgggattttagatctttatgcatcacttacatccacacagaaagggcgttccagggactgcgcacccatagagcagtgcaagctggtccaccctgcggaagccaagacctccctgagcaggcagccacgctgaaggggaacagcagctccccgatggcctccaaaggactcaacacggaaagtgaagatatatctatggcctgagacaattctggcaacgatattcatatagacattacgttcctgaacagcaagggaatcctgtgaaaggagggaacagtgaactagagacccagattccagccctctctactctgaggagtctctatgacacctttaaatcagggagaatcatttctagacttcctggggttggatcgaggatccccagaagcaaccaacttgtattcagcatacaccagatgccagacacggtgtgaaattatttgtatacattttctggttcaatccaaagaactgctctatgaacaaagctaccaggacctgcagaggattaggtttaggaagtggtgaagctggtatttgatcaagcctaggtgaagtcgtgtttgagaaacagctctgtgagctgagtacaaccagaggattgtttccaaagttaggcccaagtgggcttccaagagcaggcatcaccactaaaacaaaacagtgacactcaaggcattggaggcagaccccaagcaaacctgcacgtgttggaaaaggcccgaggccaggaggaggaggtgttctctgcagctgctcagcctgttcattctgcaccaggagcagcgcaagctgctaggataccctaatggggcaagcagggcacttactccaggctctgcagcaggaatgcccaccatggggaatgcccactatgcatagccatctggggtctcatccttcaagccacaagcctgctccacctgggccctcaaccccactcttaaggtcggagcaagtattcacgcttaccccccttggaaatgagggagaaaatcgcccatggtgtgtaggggtttgtgtgtctgtgcatgcgtgtgtctgtgcatgcatgtatgtgtgtgcatgggtgtgtttctgcatgtgtgtgtgtgtgtgtgtgtggctttagttgataatggcagtccaggtctgcaagtctctaaggtgcaggcccacatctctctagagaggacagtcagaaccacattaatcgttgcgtcgcaggtactccatgcctcgcgctgttctcagcacctcacataaactaattcacgtacttctcccaataaccctatgaagcaggtgttatttttatcctgctgtggcttatggaaaaatgaaggtgcagagagattttgtatttatccaagattacacaactaacaagtggcagcgtgagatctaagcacgaagagccaggctccagagtgctttacctgagatggagacactctgaacttctgccacctactctcatatgcctgggtgatggaggatacacaggaggctgattttaattgtacttcctgtgaatgcacaattcaccaaaattgtaagaattccatccaatgtgaaaagcacacatttgcaactcactggggtgtgaaatgtcatgaaaataaaatagtgatgctgccctcgggaggttcaggacagaggcgcagtcagggttgcatgagggctccaggaaccctcctgaggactgaaggcacccctggctcccatgccccagacctcgaaagcccagtgttctggctcctgacaaggcaccggggctctggggacaggttctctacttaggaacaggctgaaggctggctccactcatgccactgccaggtacacactctgcttggtgccaggaagatctcataacaggaagccctcctggaggggaaggaggagacgctacagtccaaagacagtgtggagagaacagggggcatggcagagaggggcgaggagaggcgcagaagggctggagcctcggccctgagaagagcttgggaactgcccttgttcctgcgtgcgttcagttggccaactcgctactgaataccactgtgttctgaggcctggggagaaagtggatttaaaaaggcaagcttcctgcttgcatgaagctaacattctagaaaagaagacaggccataggtagaccgtcccgctggcctgtccaccgtcctcatctactcctctctctgaaggtcaaatagggccactctgagtgcagcacaaggggaggggaagagacaggcacccccagatcaccaaagacgagttaaaatgagagaaatgggcacactggaagtccagtccccaccgtatgcaatattcccatggagcaagcaagcatctaaaatataacagtattttttaaatagagaaagaggcaagaatagcaccaggaacacattctgcagagaagtgagccctggtatgtgctatgttgttcaaagaaacattgcagccttacctgacattcttaggtattccctggcttctaggaaaacctgttactggtgagcagacatcagggcacagattgggcctggtgtcacagtcactgtggccagggcttctggctacagtggttaagtgagcccaggaatctgttctggccccatctaaatgatgttattttaatgctagatttccttgaggtaataaaacaaaaacagggaaactgagggaaaggataatagacataaatcactaacctaggagtccaaacccccatttaaaagtaactcagaaggttaaaataaaaaggcagatgtaggggcggtgttgaaatccacaaaatcaaaaactttgctgtgccaaagacagactcaaatccactgattgccagggtctctggagccccagctaaaatgaatgaggaaaggccactacttccaccagggagggcaaatatgcgccccttctagggccagttctcccagagagctgctgggaaccttggactcatcttccctgtgagaaaagaggctgcagtcagctcagtgcccaccaggaggaccgcagagaggacagtgaccaccgctacgggtgtcattctagacctagtcgatgttttggaatctcagagaaaatgaaaatgcccatagacatctacacaggaaaagaaataagaagaaaatgagattttcttattttttaaaaataagaagtttaaaagaaatagaaatctttctgacctcagactcctctgcagtgtcaagtgtcaggaagcagtggagtcctgtccccggaaaactgggaggaagaagtgtagcaagctgcctgtcatgtctgagaggaacagaaagggcagttggagaagtggagaaagttaggtgagaccagcctgtggaaatcatgagaaatgacagagattaaatcagaaactcacacatttggaaagaagaacattaacatgatttagtaagttggagagttgaccctttgaagaacccaataaaatacaaaactttaacaaatctaattaagaaaaaatagaaataaagaaaattggaactaaggaaagagacgtaacatatgctgataaaagtaattataattatgagataatataatgcacagttatatgctaataaattccatcaacatgtaaaaatggaacacttagtgaaaataataaattaggaaaaatagctcaagaggaagtagcaccctagaacggagccatagccatggaagagatgggaaagtgttgttagcacactgccttggaaaatatttggaggtgatgagactttattagtgcatgttgtctggacttcatggaatatataaaatgcatactataaaatttatagcagaatatagaagaaaatgaaaggcaaatccatttactttatgaagaaattctattaaccaaatttggcaaaagtagcatgaaaaatagactcgccagcacttcccaaaatacagtggcagggaggcttttcttaacaataatggcaaaggaagaaatcattaggaacaagatggatacatgtaattaagtttaaatggaaaacctcgtatcagaaaacactgtagtaaaattccaagggaaatggcaaaccgaaaaccatttgtaagaaatacaagaaaggattagttattaacaaattaaaaaaatcctctcacaattacaaaaacactatataaccacaatagacaagtacattgagacaattatacaagcaacataaatgagcaataagcatggaaaacaaaggctcaagctcactagaaaggcaaagaattacaagttaaaatcagggtgtcatgttttagcctattaaattggcaatgatataagggttctctgccatgggcaacaccgtgcactgataatggaaatataaattgatgagacatttttggaaaaggatgtgacaacattttgcaagagttttaaatgggttcagacgccctttgacctggtaattccactgctgggaatctattctaaagaaatggtcaaagataaacagaaaatgcatgttcttccctagcacagctgtgagttcccctaactcagaggccttcctatcctcccatggactcctcctctatccgatctctaaacacttgggacccaggacgtagtacctgggactacttttggccacactcttcctgagggatctattactgtcccatagtttgaaaaagtcatctgcaccttgatgacttctagatatccatatccagtcccaacttctctgagttctagacttgtctatccagcagtctagtagacccaaattctctgagttttagacttgtctatccagcagtctagtagacccaacttctctgagttttagacttgtctatccagcagtctagtagacatcactacttgaatatttaataagcaccccaacgcaacaggttccaaattaaactgctggtcccctcccaagccttcctctcctttcttatctatttcagtaaatggcaccactgtttacacaattgcttagaccaaagacctacaggttataactgagttatctcttgctctgccactttacctccaacccaccagtgaatccacatcatgctcccttcaacatcaattctgaatgcagccacccctcaccaactcttctgtgactgttcacatccgtgacatgcacctgaaacagtgctctaagctcctacctggcctccctgcttccaatccagccggccctccccagtcatgagattctccatctgcagtcagagtaagctgcttaaaaacctgtgactctcaagcttccttcacacttagaataaactctgaattatttactttggccctcaagaccttgattgtgtggtcactgctcactttcctagactcttgctgtctctgctctctctggctctctctaaaccaaccacactgccccaccactgtcctccagtggccaagttcattcttgcctcaggcatctgcacttgcctgcaacaatccacacctagatttaaccagatttcgcctgctctggaaggacgttcctggcccctgggtgaaaatgacttcttccttttgctcctatttccatcaccctctagtccctaaatccatctcacttttcctcataacgctgatcacagcctgaaatgatgtttgctgcatttcctttccgttttctgtctggaatcccctggggatgggatctcatcaaaccccatcatcctcactgctgtctccagcacctgacacggaagagacagcaaatactcgctgaatgagattaacagtggtgaaaactgaaaactgcctgcatgttcaaaaatagtgccatattttttagaaatatagtggaatctccataaacccattaaaatcgtgttttcaaaaaaaagttttaaaaggaaaattttcattgttaaacaaggtaatgtgataaaaagtaagatgcagaatcatatattttggtgatcccaattttgtaaaattatttatctagctaggtatttaaatataaagaaatacactaaaacattaataatgtttggatttgtataatagaataacaggagactttttattttattatttatacttttgaattttgcaaattttattaaaagaaactgacattgatggacattttttctatttttttttattcatttatttttgacaatcattgtgtgtatttagtgggtataatgtgatgttttgatctatgtatacattgtagaaaaattcaatcaagctaattaacatatccatcaccaagttatcatatttttgtgttgaaagtgtaaaaagatctatttttagtaattttgaagtatataatacattcttattaactgtggtctccacacatcaaaatacatcagtaaaacttcctcttgcagtaaactttgcactgtctcatcagtgtctcccatcaccccgcccctcacctgccccacctctggtcaccactgttttgccctctatttctatgcagtcaactttctcagattccacatatgagtgaagccatgcaggatttgcctcctgtgcctggcttatttcatagcataatgtcccccctttccagccacttttatagaaaaaaaacttcatactctgaagtgagagagaaaaatgactcctgcctggctaacagccaggagggaggaaggtgaaggaggcgggtgagccagttctagggctggtccagaaggtggccactcttgaccaagagatagacgggagtgaggcagcgggcctcactggaggagcccgcgccattctcaggagccatcacggggacaggagatgcacacacttctctggtccttgacaaatgaacaagtgaacgcctcaatggtaagtccacgtagcccataagagaggatactccaggatgccagtgtggcagaaacagcaaacacagcctctgcgctccgcccccgtgcaggtttttttgaccacaggctcctcacagccagcctgtgagcaaatgctgcctcatgtactgtgcacagagaggccacagatgactgtggcctctgctgattactttggaattaaaaacaccatgagcccaggcctggaaacacagaggccttttgtgccagttaagcaccttcagggggaaggagaggaagaggaggaggaagaagatggggaggaagggaggaagggaaggaggaggtgaaggaaggaaaggagagggaggagaaggaggaaggcaggtgaggaggagggaaggaggggcaagaagaagggaaagggggagagagaggggtagagaaagggacgacggaggagatgggaggaggatggatttggagatggggacaagacccctgcatcctggccctctggacactgtatcctaaaagctggagctgtttattatctgagtgatattatttggggggcattaaggaaaaatgagcagaagaaattgtgctcttgagagatgaggacagacagaaacttcagacccattcactaaaggctgaggatacatgggagggccaggccctggatgtgtctcaagaatcggggctgtgctctgagatgaccagctggacagccagaggccctggcttcccctgtgtcatctactgttggaccagcttattctagagcaatgtggaaaggaaggatgatggaggcagaaaaaaagaagaaagaggagagaaaggaaaaatggacagagaaggggaggtagagaaagagagaggcagaaagactgaaagatttcaaaggcaaactacagctgtgcatggtggtgcatacctgtagtcacagctattcggggggtggggggtggtgaggcaggaagaccacttgaaccccggaggtggaggctgtggtgggttgtgatcgcaccactgcattccagcccaggcaacagagtgagaccctgtctccaacaacaaccaccaacaacaaattgtttaaagtaaacctcctcagtatggcttaaaaggaagtaaagagaatggatcaagccatgcagggtcctcacctggttatcagagagaaatggacagcaagaggggcttctccgaagtgtagctcccaactctgcacactcaggcctttcacaagcatggatccatgtgaccccaacagtcctacagggtgtatggaacattccagcccctttgtcaggtgagaactgaggctttggagaggacagaggagtcaaagagcttcagcgggtagagccagcctctggtcctgcacaagcccacaggtgtgtggaaggagatggaggtaaagcacctgccgggacaggaagggcctctatggattagggatgtttccaaagctggtcagagagctaggaccagagtgggagggctgcagctgaaaggtagtgtataataggctttgggtatttgtgttcgtggttgggcgggtaatgttttccatttccagatgcactgcagcctctgcccacacatcaacacagaaaccccgccatttggaaggtgttctgtgcagacacctaaacgtcattatcccaaaacaccaagccagccagccaaggcttcagaaagtacctgaacagctgagcttgctgttttgatgaaacgctgtttgacagaaaaacaggccacccctggtaatatgtagagaatgataggattcatgaatatgcatgaagtcctctttctagagacaattgccgcagcggttattggagcagaacaggccgggtgggaagacagcttattcccaaagccactctgcctccctgctgggagtatatggaacttaagatcatttcctggggccccatggtgtggtctcagcactacctaggcccacagaggccctctgagggccacctgatgagggccacctcaccctagcccaccacacattggtcagagcagaaaatagagctgaaagggaagaatgggtttgcccaaggtcacacagcagctcctgacggtcaggacctctgccaccaggtcaagtggcccccacattgcaggcccctgggaggacacagatgcagaccagaatctgagcagaggacagctctcaggacagctcagctggcatgcccaccctgcaggggaaagactgcccatgcccacactgaggcaggggaaccacggtgaggagctgagtgaagaccccccacagagctaggcccaggactcccagggggagagtgtggatgggtatctgcctccaccccgagctgtctgcaatttctttccatgcaaaggataaggtctgaccaacacagtcacaacaaggcatgagtgattctcaggttaactctacttttgaagaagaagaagagcccacaaagaacttaaaacagaactaccattcagcccacctatcccatgactgggtatctacccaaaggaaaatcaattgttccaccaaagggacatctgcacccgtatgttgatcacaacactattcacaatagcaaaggcatggaatcaacccaggtgtctgtcaacagtggactggagaaagaaaatgtggcacatatacactgtggaatactatgcagctgtaaaaaatgaccaaatcaggttccttgcagcaacatggatgtagctggagaccattatcctaagcgaattaatgcagaaacagaaaacctgttttcacttataagtggaagccaaaccttggttccacatgcacataaagatggcaacaatagccgggggaaccactagaagcgggagggtgggagaggtgtgtgggttgaaaaacagcccattgagtaccatgttcactgcctgggtgatggggtcatttgagcccaaacctcattgtcactcaatatacccaggtcacaaacctgcacacgcagctgccaagtataaaataaaagtggaaattctaaaaagaaaaaggagaagaggaagaggaaactagaaaggcaaagggaagagacagcaatagtggatgatgctcaagtattccatagattaccccagccacacccctagtccactggcagcaacatggtccaaagcccgaggtggccgtggcaagagccacacccctggtctgagtccccatgcagcctccacacttcagtagcaggagcaaagctggaagtcagacattttccaaagaaagccaggcatgcttggacagtgggatctggccactgtcagcatccagcgcctggtgctctgaagtctgaggagagtacagggcaggacaaacccgctgtcgggtgcatctcacactgaagaggcaggggacagcagttccctttgatggagctacgcagatctgaggttgctggaagcagcaacccccgtttcatctgcttttgaaggagtctgaggtagacggctggcgggaaggccacgccatactgagcacaagggccactcacttgcagaacctgctgtgaagagggaatccaaacccactttgctggtgcaaatggtgctctgcaggcccagggcgaggagaggccatctggagttcacaggcatttaggaagcagagtggatacatgaggagcacttctggaaacctgttttgtaccacggcaccccagagacctaggagtgatctcaagctctgccactttggacaacgtttttgttagctctctgggcctcattctccttctctgcagctggttgcatgccgtgtgttctgccagctcgctgcctcattcacactggccagtgctctctgcccaagagcttctctgcttcatgtgccaatccagagatgccagggatcgcgcaccttccgtgacagccctggaccgatggggatggagccagtggatagatatgcccccaggttcactttccttccttctgtcttcctgtcttcccagttctctatcccaaattctctaaagtcacttccaaaaatcaaccttctgcccacaggcccttgtcccaagttcttgggttctgagaggaatccaggctaagactgaaagaactacagacccacaggagttccagccatggcattcacgaccctcctctgctgagggcaggctggggttttacttccccttcttgtctgtgggtgggcataggtggggagaggtgcaagctcaggagctgggctattccatggcctcgccccacctgggagttatatcatggattcctgggtgggtcttccaggaagagaaacggatccggaactgtggacgcagggtcgactctctgaaatcccttctcggggctttggaatttgtggtcccttaatgcttcagtctcagcagcgcctcgacagtcatgcctctggccttcccaagacctctccccagcatgatgaagggtctatgctctcccagcatctcctccaacagaaatggtctctgcctctgagatgtggcaatacagagaccgtgcatcatggggaaaatgaacagaagggagtaaccatagggagccagctggttcagggatggggcagagaaaatagaggaagagcctggagtatcctgtggccactagacagtaagaaagtattaaatagccaggagatcggacagcctgggcaacatagccagactctgtctgtacaaaaaataaaataaaaaatagccagctatttgggaagctggggcaggaggataactggagcccaagagtttgagactgcggtgagctatgattgtgccactgcactacagcctgagcagcaaagtgagactgtctctaaaaacaacaacagcaacaacaaaaacatatatgtatgtgtatgtgtatttcaaaaggctacaggaagcaaaccgaaggggctccgaatggccaaagttaggacaacttgagcaaaataaataactatggtattgaattatagcccaagacataatgtaaatatccataggtccatcctgattaaatgcgtaactgaatacataaataaatgagggagaagcagcaattcttccttacagaagaattccgaataataaatgtagaagaaataagggaagtagaaattcatcaatagcacaccacagtaataattgttacagccaagatctactgatggatatgaaaatgagtgggggaaagtttaagcaaaaacaggatatttacataatctcaaatatctgctttccaatacttagtaatttcaagataaaaatagtaagtttgcagtagaccattttggtagataccaccttagccaagtgatcaaggactcaccaatagtaagacacattgaagtgacatcatgtgtccccaggatgaggcactaagaagggcaagtcgctgctgtgggatccttcccaataaagcataatgtcaatcaaatcaggagtaaaccagcagacacacccaaataaaggggcgttctacaaaataacttaccagttctttcttccttctcctcctcctcctccttcttcctctccttcttcttctccttcttcctcctctcttcttcctcttcctcctcttcttcctcctcctcctccgtcttcttcttcttcttcttttccttctccttctcctcctcctccttcttcttcttcctcttttttttaaagacaagatctagatctgttgcgcaggctggagtgcagtagcctgatgtgcagggacgcgatcatggctcactgcagcctcaatgacctcccagactcaagcaaccctgccacctcagtctgccaactacctgggaccacaggcgtgcaacaccacacccagctgtttttatttttttagagatggggtcttgctttgttgtccaggctggtctcaaactcctggctccaagtgatcctcctcccttacaaagtgctgggattacagatgtgagccaacatgcccagccatcttaacagtcttcttcaaaaaaaatatttttaatacaaggtcttgctttgtcatccaggctggagtgcagtggtgcaatcatagctcactatagcctcgaactcttgggctcaagcaatcttcccacctcaacctccttggtagctgggactataggcacatgccaccatgcctgactaacttttatttatttttattttttgtagaggtggagtcttgctatcttgtccaggctgttctttaaaattttgaagattaagaaagacaagagaagaacaagaaactgtcacagattgtggggcggagagactgagggggcaggtggctaaataacatgtgggaggctgggtcagatgctgaaacagaaaaatatttttatttttatgtaagaagtaggtgatagaagaaagaaaaggagagagaggagggaaggaaggaaggggaaagagggagagagggaaggaaaagagagaaagaaagaaggaaagaaagagagataaagagagaaggaaagaaggaaggaaagaaggaaggaaggaaggaaggggagggaggaagggagggaaggaaaagacagagggaaagaaagaaaagaggaaaaaagaaagaaagagagaaagagagaaggaagggagggagggagggaaggagagaggaagggagggagtgggggagggagggagggaaggagggaaggagggaggaaggcagggagcgggggagggaaggaagggcaaacaaaacaagattgttagaggaaaacccggtgaaatccgaatgagttctgtgctgtggttactagcactgtcccaaggctaatgtcttagtttcgataaacggtctgtggttatgtaaaatgttaacatattggggaactaggtgaagggtatgaaggaattctctgcactctttttgcacctctttggtaactttatcacaatattcaaaacaaaccctaactgtaaaaatatttaaaggagcaagagggaaaaatcacataaacatggacacttgtgcctgccattcccttggcaagtgtgagatcaggagtgaatctgtgtgcaggcctcagcgtgtaggcacctcagagctgtggccccgaaactcaagctggttatttcctctgtcgtcccagagaaggagcatcccacagttcagtcacgagatgagaatccagtggtctggagggatccagtgctcctggtctcccaggtgatcccctcgtcctgcactttggaccagggcctcgtgttctgagtggagaccgccagccgtgtgtcaggcagggttccacggtggcccccggggttcccttttcactgtccttaattcctgcataagcctgggcttggaggtggactgtggaatcaccctcaagctttgcccctctcctctggttccacgcttccccggggcccgaccgcttccctccaggcactcaccctgaccgacgcactcagcactgccacgcctgctgatgtccagtgacgaagcactccgagtgtttcagcctggaccgtgcggggactatgagggccatgtgctgtccttgctactccgatgagatcaggtagtgtagggttgtgacagacgtatttatattggtgtttgacaatggttcctggctgacaacctccgtagcccttgcaacagtcttttgtggtcatgttgggtgtgtcaggcctcaggaacaggcctcaggaaacagtgtttctccaagctcttcctgccctcccttcgcctgcctcaaagcaggactcgaatcttctcctgcctctctgatttggggtcataagaccctccccagagagggtcccaccctactccctgggggaaggaatgcacacgtcttggggcttctcctaaaaacccgagaggactgggttcgggagctttagggcggctgaacataggcaggctcctggagggtggcctccagggagggcacgaaagctccatgcccctccctcaggtctatctcccctgtgcatctcttatcctttgtaacatcctatataacaaacgggcacacgtgtttccctgagttctgtgagcttcggttggtcagaggttctggaggcctggacttgtgactgatgtctgggggtggggcagtcttggggacagagcaatcaccctgtggaatatgacactctctccaggtagacggtgtcagaatggattttggacaccctgctggtgcctgctgcataattcatcactcgcttgctggtggggaaaacgccccacaagtttgctcacttctgtgttgatgattgctgctgcagtggtttgagggcagaggaaaaacatagtttgagagtttttcaaaaacaggcattttcactatatttaggacagaggctgctgagagcaggtgggattgtcttggagccctgctcctctgtgccctcaagatccaaagtcaaaaggctactcaggccaggggcagtggctcacgtctgtaatcccagcactttgggaggccgaggcggaaggatcatctgaggtcaggagtttgagactagcctggccaacatggtgaaaccccatctctactaagaaaaaaaaaaaaaattagccaggcctggtggcacatgcctgtaatcccagctactcaggaggctgaggcatgagaatggcttgaacccaggaggcagaggtggcagtaagcccagatcacgccattgcacttcagcctgggtaacaaggcgagacttcatatcaaaaaaaaaaaggctactcagccagctcctatgaccactgaccctctgtactatggccagactccacagatgaaccaggcatcttgggtggtgttttaggatatgacctacaggaggagccagggccagggagactgaaagccagtggggccagacagtgtcaatagcaccagagcactctaacacctggcaagcttcaccctgagccagggcccccaccagccagcgggagaatctgtcatcgtgacaagccaacctgccttccgcctgtgctgcttcactggcctgatggttagggaaggaaatttgatctctccttcctgcccagttcctcttaactgcaggcccagggcggggtgacagcagcagttggcatcttccaggcaggaccctgtgcacactgactgcgaggccagagggaagggccaagcttgggagcctgccgagggaggcagttaataggtgagcatctctcagcctggagagccacgatcctcctggaaccctgcagccaacggcagctccccagcatcaggaagtaggaagaactctcccggctgtggaatctgtacctggcatttaaagtttcctctcccaagtaatctttgagacacttgcttattgttaaaggaaaaacctggaccgtgtaggagaacatccccccacactgggaaggagctgagaccaaagaatgactgggacacacccagtatatgagtttattaggactccatgcatggcccccctgggtggtggcaggacagctctggagatccgccctgcctcccatctctaagctgcttttgagctagttttctggctctgtgtgcaaagagactgtttctcttggtctgttcccagatacactctgggatgtttgggttctcagggacacctgcttctcagctgggctctatggccttgattcataacccggtcttcagggttcaagcagcagacatgcaaccttagataacctggtgggggacctgtcaccctacacgtatgatcccacacttggactgaaagggagggtaaatagaatacttcctaggcaagcttgggtgtggagatttaactctaaggaaatttgcaataggaaaaatcactgaaaaggcactggtgaaataatggataaagcacacttgttgcttatagcatccagtccctctttgttcaggaaataggactcggggagtggagaatgtggttctggaattcgaagagagttctgggcactgtgctctccctgtcacttaacctaccttcaactacagaggtccccagttgcccattccttcatgaatcacagttcccaggccacagggattggctcatggtcgagcctgtgacccaggcttatctgacaggaggacacctgggactttcttcctgggaatggtgggacgtagctcgtcttcccatgagccaggctgccatgggctattgagattgctaaaataactattgcagctataaggtgaactggtctgaaggcacagttaacacccaaaggagagagtctctgagaaatagagctggaatcctgaggacattttgaatctctggattgaactgtacctgaagccagtccatatttagaatttttgtttccatccatttgagttttttaggccagtttagattgggttccctgtcacttgcaactgaaataactgaacatctagaggttggctataaagcactttccccagcaatcatttctgggtggccaaaatcatgatgttgttttacaacttcctttccctggcctgaattcttgaatttctctctaataagcttggattatattttagagaagataataatgttatttttaccttgatatgatattacttgtcttctgtactcaggtgcccttcaaacccaggggaaggctccacctggatgtcctaggagctctgatccacatggaacttgcctgccagggctccttgctctggaactttacagccttaccaactaacacttgtgtattaattacacctttttattttttgtcttggaacttggcagatcctagagagcctactcctcctagggctagccaatggctggagatagtaaatgagcatccctttcatatgaaaaccaccaaatgcagaacccacatcccccaggccccctttatcaggcttgcaagggcccatatactttgggccactattccctttccctgatcatcccagggccaggcgcctgtagcccaggggcctctgaaagtactagaacgagccaatcctgagccccaagtctgcttaccccgccctgccttgccttttccatgggaaccacagtaaaggctctggtctctgtttctcccttgctctccctgcctcctgaccgactttggtgcctccccaggaggccctgcatggcatgcctcccactttgggaactgcgagtgaaaccgcctttacaaaatctgacagtaagaggctccatcttgcttctaccctccaaactatccttggtcattcctgggcataggccaagttaattttgggaggaattatactttctagtttaaagcaagaatgataatagctcttccccaaactaaaccacctttctaaaactaatgaaaatccacaagattaggatgatgagagggacctgaattctgctaagatataggcattgctaaatgataaccagccattgctccagaagtcacaagatttgtaacttccccaattactcctgcaggtaacatcactattgtagaacctgtgcctggcctttggagatgtcttttcagactgtaaaaagtgaagtagaggttcctcttcaaagagactctcctccccatctgatgaagaacaagtagtaacttctcttagaagcgaaatttatacaagacctgtgctaacattcttaaatatctgccagccataataaagaaatcaatatactttgtgctcttagctcccacaatttagcctaaatatttgccctggcatgcttatactgctccaagcaagcattatgtcatggcctgttcctcttccttatttggaggtatttttacctttctcagcattccacaagttacttcctccttcctttgttctcctctgcctttgcctcttttgaaaagttctaagttgctagccaattgggacaaatacaaaatgtgaggtcccattccaagcaatggaaaccagacacagcagtaaggtggacatgttaggttataaatgaccctgtctcctttgtttggtgtattctcatggcaaaactgctggggagtgtaccctttctgcagaaagtaaaactggccttgctgagataatgaaatttgtgttcaagtgctatttctttgtggcaccggagaacaatcatttgatttttacatataacaaggcttttgcatttctgagatcagatgactccacccggacctggacctgtggctcacgactcagcagatcctgtggccccacccagaggcaaatgcagcacatgcggaccattttccatactcctatgatttcattcttaaccaatcaacagtccccattcctggcccctgcccaccgaactgtccttgaaaaaccttaacccccaagagccttggggagaatgatttgaatgataactccatcttctgcttggctggccttgtatcaggtaaactttttctttactgcgatgttgtggtctcagtgagttgattgatctgtgcagcaggcaggaagaactggtcagggaattacaggagtaacgaattaccattttaatggcaatcctcttctgatccattgacttcaccttatttaaataataataataaaactcacattttaaaacaacgttcatctattaggtgccacacaccccacagggtgctcagacagaccctgtaaagccaccagattttcctttcagaagcccttctcttgcaccaggaagagagctgttcccctttctctttcttttgcctgttaagcctctgctcctaaactcactcctcatgtgtgtctgtgtccttaatctccttggcgtgagacgatgaaccctgggtatttaccccagacaacgacaccacttaaatgtatttttgtaactggtacaacgttgagcaaacagtaggcacttaaccaaggcacactggttatttgataaagcagactaatcaggccacacaaaagccacagtcactatataatatattgctggaggggcctctgatagcttctagatcaggatttatacagtgcctcttccattagatgttatgagggtctatcttaggctgggttcccctagaagcaaacctgaaacaagggtttgcatgccacgtggctgatttgggaggcaattccagaaagcacagaaaggaagtgggaaagtgaaatagagaagagaagacagcccacaccaggaatgttggtgaacaactggggcttagtcccctggggacctctgaagggcagtgtagggcagtgatcctcatacattggcacatgaaggaatcccctgaggggttgttagagtctgtgccccaccccagagtccccgattcagtggtcccaggtgacatggctactgctgggcccaagaccacacttggagaaccacaggctcacactgtacatgacagttgcctctacccatccccaaggaagaagaagtttttttaacttttatttaaggttgagggttacatgtgcccctcaggtacatgtttgtcatataggtttgttacatatgtaaacttgtgtcatggggggttgttgtatgatgtatttcatcacccaggtattaccctagtaccccgatcctctccctcttcccaccctccatccttcattaggccccagtgtgtgtcattctgctctatgtgcccatgtgttctcatcatttagctatcacttataaattagaacatgtggtatttggatttctgttcctggattagtttgaagcttgggtatctaccatccaagtaactttcattgctggtggagggcagccctcaggggcagtggctctctagcactggtggcctgtatctgtatggggggagagaaagtccttgtgcagagaagctggcacttgcagtaaggcaccatgagctcgcctggggagagtcagcatggagccatgtgggaaccccagcagtgtctgttacagcaccctgcctgtgatggttaatcttatgtcaacttgactcggctacaggattcccagttagctaggaaaacattatttctggctgtgtctataagggtgttcccagaaaaggtcagcatttaaatcaagcaactgagtaaagactgtcttcacccacgtaagcaagtattacccaacccattcagcaccagaaggggattaaaaaaaaatgaagaggggggatttgctttctcttcttaagatgggatatccacctgctcctgctcttggacactggagctcctgagtctcgggcctttgattagaacttgtattagtttgttctcacactgctgtaaagaactacctgagactgggtaatttataaagaaaagaggtttaactgactcacagttccatggatatacaggaaacacggcttggaggccacaggaaacttatatcatggtggaaggcaaaggggaagcaagctcatcttaccatggcagagcaagagagagtgcaaaggatgctacacaccttcagacaaccagatcccatgagaactcactccccatcacaagaacagcaaggcaaggggggaatatgctcccatgatccaatcacctctcaccaggtccctcctccaacatggagaattacaattcaacatgagatctgggtgggacacagagccaaaccatatcagaactacaccctagttttcctgggcctccagcttgtaggtggcagactgtgagggctccctaggctccacagtcatgtgaaccagtcccccatgttaaatatctctctcacggccaggcatggtggttcatgctcgtaatccactttgggaggccgaggcaggcagatcacttgaggttaggagttcgagaccagctcggccaacatggtgaaaccccgcctatactaaaaatacacacacacaaaaaaaattagctgagcatggtggtgcacgcctgtagttccagctacttgggaggctgaggcaggagaatcacttgaacccaggaggcggagcttgcagtgagtcgagattgtaccactgcactctagcctggtgatagagtgagactccatctcaaaacaaaacaaaacaaaacaaaaacttcctctctctctctctctcactaggtatatagatagatagatagatagatagatagatagatagatagatggatggatatggatagataatagatagagagatagatacatgctgttcattctgtttttctacagaactctaatactctaccctaaaacaaaacttctgtagtccaagaagcccccattctaatcagaacacacaaaagccacagtcactaaataatataatatgtaatatccctttctggaaagtcacagtattcactcacatagtaagtgttctcagaagttctgaaatgaggagataccttgaactcaatatttcccacatttatttgaccctcttttgggagaaggcagtttggaaattgttgttctagattggggtttggcagatgagtcctgtaggctgaatgtgacctgcagcctctctgtgtgtgtaaactgtggttggaatgcagccatgcccatttgttcctatgctacctatagctgctttcagctgcaacaacagagctgaacacttgtaatagagaatgtgtggccacaaagcccagaacatttacaatctggcccttggcagaatagttctagactaacagacagtgagactgtgacccaaagagggaaggcattttccccaaggtcactgaggagatagtggtaaagttgggacaagagtgcctggttcctgatcctccccttttcctgaagacccttccaccactctcagctctgcctcacagttcctctcctttatctcttggtctctatccttggctcaccaaggtgagtgatgatcattctccagaaagcaatccccgtgcttctgtctaaaggctcccctggaggccactggaccactcacccatcaggtttgtgtgaggagccaggcctgttttaggaaaggggatgattcaggaagcaagacctggatggcatgcttctgttctgggtgcaggctagtggagaatgggagaccaagactctctgtaaaacaaaaaagaatatcgtttgtgctgaatgttttggagacaactgtagcaggacgagccacagacaacacccctcagacactgggttaaagaaggaagtggctttattcagccaggagcattggtagacttgctctcaagaaccgagctccattaagaaagagttcctggcccttttaagggcttacaactctaaggcgtccacgtgacagggtcgtgatagattgagcaagcaggtggtacatgactaggtgggggtggttagcaaggcaagtatttctccacaccattgtctgtgatctatagatagcacaagctctagggtgggggttaatgtttaacctacagtcctggccagtggcaccgatcagtctgttatttttcagtttttacttcctccttttctttggagacaggagacagtaagagaaatggcctctctcctcacaatgacacaagtaagccagaggccggggagtctgttgaggatggctgggaattgatggccatgggagccctttgcaaggagggacacgaagctaagatgcaaatcacagagctaagacactgtgtgaaagccgaaggacaagcatccaggcaggaggaagagcaagttaaatgggtggagagggagcaccctagcaggagaggagggagggagcattgagtcagggagggttgtggcctgaccatcgaaagccttgcggggcatgttcagaaatttggactttctcctcaggaagatggggagctggtgagtgcaagagcaattcccaggaaacagactaaaattctaacacatgtgcaggcttctccatggacaccgatggtcccagaggcctagatcatgcaagaaaaggcacatgcctgcctggggatgctccaagggacgggttaaacattcacacatctacaccttagatgaggcagcatgtgccgtccttaggatgccctacatcccagcgtgcccgggtcagtccccactcgcatatgttgccctgatattgattactcataacaccccctttcactcttaatcgtttcttggtgtgaatgataaattatatggctacctaattataccatttgcgtccacctaatttaagcctcagctcatgaggcccattactattgggtcgatggtttattctaccttgaaatataaattccttgcaattaataaaaactgtcacatgtttatgtcttatttctcctgctgcactgtgtattcccaagggcaagacacgtgtgtttatcagttcattttgataaagagcatgtattagtccattttgtgttgtgttgctatgaaggaacacctgaaactgggtaacgtacaaagaaaagaggtttgtttggcccatggttctgcaggctgtataaacatggtgccagcatctgcttggcttctggggaggcctcaggaagcttttactcatagcagaaggcaaaggaggatcaggagtgccacgtggtgaggagggagcaagagagcgaggaggaggaggtgccaggctcctttcaacaaccagcgctcccatgaactcattaccactgggagcacaccccgccatccatgagggacctgcccccatgacccagacacctcccaccaagctccatcaccaacactgaggatcacatttcaacatgagatttggagggacaaacatctaaatcatatctgagctttcccacatctaacatgaaagtaatacgcaggcttaggcacattactgctcataaatgaggtcattttgtcttcacaacaaaattattggagtatggagagtcatttcccatttatgaactggagaggtaaagtgagtcgccaaggtctcacagccattagctgtcagaatcagaacttaaacctgggtgtgacaggctccatccctaggcatctttctaagccaccaccctgccactgaaggcctggctgacctctctcccagggcagctcctgactgcctaataagacagaggagaatgcacaataacctttcctgtctgagttttgcaaatataaagcgccctgtaactgctgaataacagccgtcagccttggcgggtgatcaggacatagtgaggactgttgacggtgttgagatttttatgactatttcctaatgggtgtcaggtcagatgtaattccctgtaatgtcagagcttatcagtctcgctcgaggcagtcagacatggcccacacagccagggtgttcttggcgcacgttcaaaccatctgagtctcttctcagagggttttctgaacactagcccccagggaggtacacacggaagatgcaggtatccctgggactagttggttgagggagccacagctggggccttcactagcagccttcacctgtagcctcagggagacttgtaaggtactttgtgctctctcgggggcagagccatggtgccaggggaaccccagggactggagagtcctcatgttctttccctccctcctgaggcaggctcagagctgtggctgccaagaccattctcaccctagctcagcctacagccaccggagagaactgggtttcaatactgccaagtgccacttctcagtccctctaggcctcaaactctacccctgtaagcctcggtgacaggggccacctcacagggctgctgtgtagttgaaatgcctgggggcttgcacacagtaggtgctcagactaggggagccatcagcatcctcatcatcacatcctcgccctcttcaggggctggagctctgaaagagcagaaggtgggcatggaggaggtgacctccccccataagctgccttctatgtctctgtcctgggacaccccaaggggcaggggaaccccgagctgagagggtgacacacagaaggctaagttgtctcctgcaaaatgcttccccgggcccagctcttcccctggttttctgcaccctgcaatgagtccacaattaggttaatgagtaaattggattcggaagcctggaaaaatgatatcctggaccaccctgctctaagcaagagctgtttatcaatgccagtggggtacacacatcctccattcaattctctgttcataagttttcattttattttttactttcaattacggaaattttcaaacactccccaaagtagagaaaataatataatgaatcctcatttttaacaattacgtgtttctgtcattcttctctcagctgccccatacacatacatttttaaggcaaattcccaacatcgtgtcatttcactcctaaatacatccttgtggtgccccagccatctttggtgcatggtcggggaggcggggagaggggtgggggaggtggggagaggggtgagggaggcggggagaggggtgggggaattccacttcaaagacatgggtgaccggtcctggaatggaaccagagtccagggcctccagaactgctctttacaaacatcccataatgcacctggagtgcagggagttaggagtagatgtgggaggaatctaccttggaatcttatcttggaatctaacgccagcatggaggacatcacccagccctggaaatatccgggtgtctggagatgcatccacgccaggacccatgagcaagggagagaatgcgaccaactcctgggactctagggcagcagtcttggggaagtgtggcatcctcactgtgagagagagagagctggaggcagccaccagctccccctccctgccctcctctgccaaaggaaggccctgctatttcaacacaagcggcttgcaggaggagcctgttaagaggacggctggtccactgaaaaagcggcagcagcttcagaaaggttaaaatgtgactcccctgcccctgacaaaaaaactgttttcaattcagaaaacaaggtgtctatggccatattaccatggacgtgcctggtgtcatctgatctcagaagctaaacaggctctggattgatcaatacttggatggaagaaaacaaagtgtgcccattttacagataagaaagacaagcctcagagaaataaaaaatttatcagccaccgggtgacagaggcggctctaatccagtgattccttccctccttcctcatcttgtcttcctggttcaaggttagctcccagagctcattcccgggaggaaacagttctgggtgactgattcactgatcagcttggtttgggtttcataaaacgctgtgctggaacactgagtcggtacttctcccaagtttccagttcggagacacgaggagaatgctaaaagctcgaatatgcaaatgaacatttggacagatttcctctagagtttcggcctccaggcaaatgatttattccctgcagaaatgcatttttgtttctgcttaacgggtgaaaaaggagaaaagatttttcgggacaaccaagcttaggaataaaagtctccatgggaaatgtacttttctgaaagcaaatgttggctaaacaaggacagtgttgactaaacacgtgttcccctcacccaaaggaatggagtcagagaatcccccaagctccaaattgtgggggcagatggatcttttagaagttcacggttcgcctttctcctgcccagccccatgccttaagcaaagtgtgggatggtctcgggaggacacccacaaatgtaagtaggaaggtgggaagcagcctctcctctaatatagaaaaacaactgtgacagacagaacaaagcatgtggttcagacacgagaccctgagctagccctggggagggagacagcagctttgcagccgttatcctcaggaagccctgagcgctgagaggcactgttacagaaccgaactggggtccactcgctaggtgagtaaaacccgacagccacaccgagttttcacagcaataaaaaggaaagtgtttatttgcagggcaccaagcaaggaggatctggaagctactgctcagctcctgacctcccacatggcttgagggtgaaggtgtttaaaggtaggggtaggctgggtgcagtggctcacatctgtaatcccagcaatttgggaggctgaggcaggcagatcactggaggttgggagttcaagccagcctggccaacatggtgaaaccttgtctctactaaaaatacaaaaattagccaggtgtggtggcacacgcctgtagtcccagctacttgggaggctgaagtgggagaattgcttgaatctgggaggcaaaggttgcagtgagccgaggtcacaccactgccctgcagcctgagagacagagcaagactgaaaataaataaataaataaataaataaataaataaataaatatatatatatatatatatatatataggggtaaacttcagaagagcagaagccacaggcaaaatcagaaatcaatatatggagggtacacactgattttggcctaaaagggtgggggcatctttaaaggggaggagcttacaggtcataggtagattcaaagattttctgatttgcaattagttaaggaagagaagctttgtttaaaaattgggggtcagcagaaaaacatgttaactggctaggggacagggtgactcccaccaagcctctcaggaataaacttaaaacaaagaacagtgtggtcagagttctgcctgcaattcccccttatccgaggtctacctgtcagcgaatcccaccggggtctgcagtggggtctgggtgtgtgaaagaactcagggacatatgttgagatgttatctttcatttctgtagagaaaccaaaaatctctggacttatttccttggctttaggtgacgattgctttcttgcttacttacttttcaggcctacctaggtgcctggaatttcccttcgaggaacgcaggagttttctttattttcatgcttgggaaggctcattaggcccctaagagagggtcccttccccatctcaggactaaaatgcaatgaagatgttgctcaggtatgctcggggaagacaggctgggagggctggggccacctttaaggagaattcctaacacactgggcgcccgaacccctgatgggaccttgtggtcttgaatgaaaagatcaggcattagctctgtgtgcccactgacttttactaaacaggctgctgcccagcctagttcaacgtgaccccatccccaccccctttctctgtgctcccccatcacccagcccacatggtgggaccttcactctcatgaccagctcaggccatgctgtgcactcctgatgaagcctcttgagctccttcttcagagctgctgataatctggcattgaatggccaggctggaggttgaatgctgaatccttttgaatgctgtggtaaagcctggcatgtctcagcactgtctccttttgtgttcaatcatcctgacactgcagaggcagctggagagggatgggtctgtggaggatgccccgcagagtgaagtcgagatgatgcagccaccagggccggagggtgagtttcctagtccttgtgtgtaactgggtcactatttttagttggaacctccagtcaaaaatgtcaaacagggaaaatgaatgtgggcttggctgagaagaagccagaggtgaaggttttgttccatctcacttagcagctcactctgggacttggaaaaggccttttctcagttctgggcccaggctttcccacttgaacagctgacattctgtggatcagagaccaccactaccgcagggaaaagggacttagccgtaggaagccagcagcctgctggaaagttcttgcagatgtctgtaatgctgaggtttgcactcagctctcccgctcttgcctgcgaaagtcagaaaatgtggccaggtgcagtggcttacatctgtaatcccagcattttgggaagccaagatgggagaatcacttgagcccagcagttcaagaccagcctgagcaacatagcaagaccccatctctagtgcctgtgggcctagctactcgggaggctgaggcaggaggatcgcttgagcccaggagttcagagattgcagtgagtcacgatgacactactgcactccagcctgggcaacagaatgaaattctgtctctaaaatataaaatgaataaaaaatttaaaaattcaagaagcagaaaagggaaatgtttagcagggtcacaggtgccacagatttcagcatgctgcggaggagccccacctgccaccgccccatcagccaggcccgccggcccatccccgcagcctcaggacccccaaatctagagatccccaggccatggaagatgcatgggactcaggactggaagagagatcagcaaggcaacttcctcatctcctggctaactgatggagctattgatggaaaaatcaaactccgtaaggtatttttcagaggtttattctgagccagtatgagtgaccatggccccggaaatgcagtcttaagaggccctgagagagtgcgtccgggacagttggattacggcttagttttgtacatttcaggcaggcaggagttgcgagtgaagacatgaattaatacatggaaggtgtattttggatcagccccaaaaggtggaatatcttgaagcagggacttatagatcatcagtggacctagagattctttaatttgcaactgattaaaggagtagagctttgtctaaaaatttggagttagcagaaaagaatgttttaagttaaggaagtttgttaaccaaactactgggtcagagtgacctgtaggggtgcatgacttaccccttgtctggcacggccttaggtcctgtttataattggtatcctattgtcgcaaagggtctgctctgtcagtcttctgatctctattttagcatgaatgccaagcagtggttttgtctaaactccaaaagggagggagtgtaacgaggcgtgtctggcctcccttcctgtcatggtcagacactcattttctaagatttttctggggtcccctaggccaagaagaggtactcagctggtaggggcttaggattttattttcagtttacagagagttattgatagaaatgcctccatgactctgatggcttgaacgagaattctctctctttcagtctctttctcaacactcaaggtagaattctcataaaatacatatgatgctgccaggcgtggtggctcacgcctgtaatcccagcactttgggaggccaaggagggtggatcacctgaggtcgggagttcgagactagccagaccaacatggagaaaccctgtctttactaaaaatacaaaaattagccgggcatggtgctgcatgcctgtaatcccagctacttgggaggctgaggcaggcgaatcgcttgaacccaggaggcagaggttgtggcgagccgagattgggccgttacactccagcctgggcaacaagagtgaaactctatcaaaaacaaacaaacaaacaaacaaacaaacaaaaaatgaaaaacaccatatgatgcaatacctagatatgttctgaacttcatacttattaattctcatgtataacatatgctccaggcggtagcaagaatgtcagctcaggacagcctggtcctcactcatctgcaatgaaagactctcattcgtggtgctgggggaaggatttaactgtagaatgttgaatgatcatgtgaataaattacatagagacccagaatacgttatatgatgatcagccaacttaatcaaggatgttctgtccatgagtaaagtatttggaatttgtagtattaagaagggagggaagtccatgagatgtggctgcagtgaagtgctatatcatgtccctggttctgcttgtaactgtgaaagctgctgcttttttttttttttttaacttgcctccacagagaaagtgaaagctcacttgagcatgaacatagctcacagtagcctctaactcctgggctcaagtaatccttccacctcagcctccacagcagctagaactataggtttgtgccaccatacccagctaattattttattttattttttgttgagatggggccttgccatgttgcccaggctggtctggaacttctggcctcaagctatcctcctcccgccctggccactcaccgtgctgagattatgggcatgagccacagtacctactcaaaagcttcttaaatcagatctgggctggaactggactccaaaatgtgggaactaacacatgttttatcaggctgccagctgaggggactttgctgaatttgtggtctcaagaccctgggagtgacagctctcctcccttcccgccccccacacaccagacacacacacacacgcacacagacacacacacacacacacacacacacacacacacacagagtcaccagtcaggtatgcagagatgagaaatgagctgaagatcccacctgctgaggtcctgagactcctggccacacagaacaatagctcctattccctgagcacctactatgtgccacacacagctctaggtggctttgtaaaatggcccgttggtcaaatttacataacagggatgtagcaccttcccgcagctcattttctagagaggatgcccctcttccagcctgaggagccgctgtcaatgccagggagctctcctctagttgtaaccaagtggacgctcattcagcctgggccacttacattctctttctgggggatggggaactgggctcagaaatacatagaggccattgagaggcaggccccagccacccaagcctgggctggtacttgcagatgggagctccaggtttcctacctacagagagaggaaaatgaaccagcaaatgtacagagaggataaggaatagaggagggtgcgggatggagctgttgatcaccaaagctccagacagattccagccctcagctcccagccttcctgagaacccaccttcccgtagctgcactgactccatggatgttctattgtactgggtgctgctgggggccaggccttgtggccttgttccagggcccagtgtgcagtactccctgtccagggcacttccactctaatgggctctgtgaggcacgtccattcttttaaataaatctttgtttactggagtgagcccaagtagatttctatttcctgcacccaagagatgtgtcatgaggaccaggttggtatggattttctcagtctacagaagatgactgggaggctccgaagaggcgagaagtggcccaaggtcacccagacgcagagctggacattttatttttatttttatttgtttttttatgaacaaggtctcactctgtcgcccaggctggagtgcagtggtgtgatcatggctcaatgcagcctctacctcctgggttcaagcgatcctcccacctcagtctcccttgcagctgggatcacaggtgtgcgccactgtactcagctaattaaaaaaaaaaaattatagaaacagggtctcactttgttgcccaggctggagtgcagtggttcgatggtggctcactacagcctcaatctcctgagctcaagccatcctcctgcctcagcctcctgaaaagctgagaatacgggcactcaccaacatgcccaatttgttttaatttttctacaggcaaggtctctctatgttgcccaggctgatcttcaactcctaggcttaagcgattctcccaccttggcctcccagagtgctgggattacaggtgtgagccctggcacctggctttgagctggattttgaaagcagcacatcatcttgaagcacactcacttcccacagggctgtcattgcctcgcaggggctaaaagagttcattctgccaaaagagttcggggccctgcacccagggtaacccctggggtcaatagcagaaaccccaaagggtgctgggaaagctctgctcatagcaacacaccctccagggtgttttgaatgctatatgatgttgattcccaccacagccctgctggagccacagcacaggtgttacttcgcttttacagttggagaaaccctgagcttggagcagccaaggggcctggtgcaggaggggcaggactccacccaagactcctgacctctgctcttttcaccgcccagcaatactttaaatctgcacctaccttttacatcatctcctctgatcccttccctccttgggctgtttgctatttcttcttggcccagtctcctctacaaatttgccacccaacttctcaaatatttttcaccccttcccagtgaagcccccatctcccctaaagtcagcctccccttgtcttcctcacacactctcttgaaacacaccacaaaccaaccactgtgttctcccctcccctaaaccactctatccaggtgcatggtaccccatcagtatcaccgtctccacctaatggccaggagaaacctgaagtcagcagtggcttcagtctctttctctttctacgtcattcacaacatgtcagcatcactggcgaagtttctgtccaatccaaccacttccattgcttcaatgtatctctgtcctgtctcaactggatggctgcagtggcctccggagaggtctttctgcttcctccattgtggctgagtctattctgtaaacagcagccaggggcatccccgtgcatcctttggataaaagccaggctggcaccaggtgcagtggaatccccagggtgatgttctcccaagaccagcacaggagtgtcgggaaagcctcatgctaaaatgctgattcccggccctgagcccatccctgcaagtcagagtggcttaggatggggtgggaattgctgtttaagaaggtcccagctgatttttccgcacgccaaatgttgagggccatggaggattctgacaggcgaggaggaagggctttggaaggaaggagccctcggtccctgcagccactgaacaaagtcagaatctaagctcctgggctggggctgagaagcagctgagggtcaggagcccagcatcgaacatccggccctactactgcctggacgtgcaggctccagctgaaggactctcttcgagaaacccatgttccaagtcacaaaacgagatactgacatctgcctggcagggctgccgtgtggattaatacctttgcagtttacccagtacttagcacaggtgctaaatgcctcacaaatgtgggcattatggtaattagtgatgtgtcttcccgaaaacatcagtgattttctggttgatggatttacataacttgaaggccagtggggcttccctgtggaatgtgcctcggattcccaaggaacattattctctgttaccctctccttacacacacacccctaacacacatatgtacacatgtacctgcacacatacacccgcctaactcacatatgcacctagcacacatagacacatgcacattcacacatatacccacctaacacacacctaacacaaatatatacacatacacacgcccacctaactcacacacacctaacacacatatacacgtgcgccctcacacatacacctgcctaattcacatgcacactattggcacacatatatacacatatacctgcacatacacacccatctaacttacacatacacctagcacacacacatagacactcacacacccctcgatacacacctatccacgagccccatctcagtccctgcgaggctcctgctgcgcccagcaccgtgtgtggtagggaaggacttggcaggggtctggagtgggaggcgctggcccgtggtctggatgcccaaggctggcgctctgcttccctctctttaactcctcagggactaggaaatccttcctttccctttctggggtttcctaagtgctgtgagtggtgctacctacttaggaatcagttgatttcattcttctgacaatagtttgctccaggtcagtttgggactgcaaataaaagattttctttattttttggcagggagggacattccactttttaaatcagctttctgaagcatgatctccatataatcacctagaagcgtacagcacaatgatcttgacagatgccagcatccttggaaccactgccaccaccaacgtctcaaaccattccatcaaacccagaacactcctggtgccctgaagcgtctcccttcagtggcagaaccagcagagattcagtggtcacaaggtgagtgaggcggcctgggtctggctcctggccattaattttaaataatttgcatttaactttgaaccaccacacctggccatattggatagtgcaggaggaataaactcactggcacatccttctggggcgtctactgtgtgcccccctccaagcggagtgtgtgggaacagagagcagcatccctgccacagtgggtggcggtctgcttgagagatattttattttcttgaaacaaataaaaaagacaaaaggatgcatggtgtaaacactggtggtcaggctaaaatcaaaaaaccattagtgggcaacacagcacagagtgggctctgcccaggccacatgtgtgcagtgccagggctcggcttcagacccagatgtccacacccagccctgcctattacacaaaggcggacagagctgtgggccagcggctggcaaaaggccttggggcaaccagaactctccatcagggcattgcagcctttaagagaaggtgggaactgctgcatttgccccgccctggatctcagcccaggaaacccactgtcacagaacaacagtcttaggagctttcttatcgagacagtaggaagcttttaaacacatcagtggtgaacgccaggcgggtctctggaactttttcatcttggaaaactgaaactctctactcattgaacactgtacacttgattgagagcaaattgtatgtgtttttgccagcctcttcctgaaggcggacatttgtcttgatctgtattggaattctttatctatgtttaaattttgtatgagattgaattcatgtgtatgtgaactgaaatgaaattaaaatgtcaaactacaaaaagggggatatttttatttaaaaagacaacagtcatcccataatcataccttgtgcccccctaggctggcatgaggcaatccactatttgtaagcatagacttggggtcaaggtccgcattccacctcttctttaacttctctctaactcagtttcctcatagaaaaataaaagccctgacttcataggaccatggtgatgatttactcagtaaggtactcagcacaacatctgatgcagagtaaaaattaatgcatgtctaatgtttactatattccagccacaatgttaagctcttcatacaaacatcaaccctccaaggtggatgtgattattagtcctactctcaggatgagaaaactaaggcatatgactaaattgcatggtgctaataagtaattgcaccgggattaacactcaggcactctgattccagtgctgtgtttttaaccattagagttaagtgcctgtatttgtttcctaggtctgtgtaacaggaattatttatttatttatttgagtaagggtctcacttttttgcccaggtgggagagcagttgtgttatcccagctcatgacagcctcaaactcctgggctcaaccagtccttctgcctcagcctcccaagtaattgggattacagggatgcgccagcacacctggcttttttttttttccaattatttgtaaaaatgatatcttgcttttttgtgcaggctggtctggaactcctgggtgcaagcgatccttccacctcggcctcccaaagtgctgggattagaggcataagccaccgcgcccagccaggaatggattttctcacagttctcgatggcggaagtctgagatcaaggtcttggcagggctaggtctctctgaggcctttctccccagcttataggtcgccgcctcctctctctgtctttccttgtcttccttgtgtccacagttgtgtccaaattcccctttctcataaggacgtcagtcatgttggattagggccctccctcctgaccttgttttagcttaatctctgcaacttaacccttaacctcagtaaagatcctatttccaaatgtgttcacattctgaggtcctgaggattaggactttgaaaggattaaaacaggctcttctggcatattgacaatttcagctaaagactcttgagaaacagcaggtgcaaaaagatcacagtgacctccatgctgtaccttgagatgaaattccaatgcgaaagatgccctctccaccctagaagggaaagcaacatccttatctttgggagtgaaaagtccaaactgagagcatactgtgagtacctcattagcatcattccattctctgagcttccccgcagacttcagttgcttcttcacagctctgctctttgtcccgtccaatctctgagtaactaactcactgcttctgcaggtcttcatttctgcaggagggctcccatgctacataaatcctgcattacacttttctcctgttagtctatgttatgtccatttaattctcaggcccagccgggaccctaagaggacagaggtggagtttttccacccctacaactttacccaatcacaattcaatcctaacagtgcctttctctggaggggctctgccagcatgaattcctttacgggtggaagcctcacagtccagtctaccagtgaggtccacatgggattggctggagggagctacgaagtcaagcggcgtcaggtacagagaaacaaatcccacatccaagggccaggaggcggtagagcaaaccacgcacagccgggtgacttaagggcaaggaagtcttcctgcaggaggtgaatttggcacaagggatacgtttttaggccctgagtggaggatctgggtttcaaactggacttttgaaaaacacactcttattgtagaagggcctgcgggtttgttttaatcacttctcaaagctacgctaggcattcgcagctcaggatccccagtttagcctaataaaaaaaagtaattacatcatattacagataatttgattgtgtctgagacgataattgagttaaaacgcttattgtaacagacacatcagattggcaaggaggaagctcggcttaaatacaaacagtgttgagagtggaattaaaggattgccattgcagttaatccaatagtaattattttctgaacataaattcctgagtagtgaggacacaattatatctacaaacagtcataagaaaataattactccacgttccacctgaagcaacagtccataaaagctctggtgccgctctccaggaagccgggctctttccatcagaaactcacggccgatgccagtactgagaaaagggctcccaagcactgcgggactcaccaggcagcttatgacaggctttccaagtgtgattgctctgcccgcgtgacacccaggcccaccgtgtatatgaccaccccaacaggccgacacttaagacaccccagaggatgaacacgcacgtctttcgttcacagactgcagtctccagcctcaccccctgggccacccaccctcccccgctggactgacagccttcccgtaccatccagaggccatggcctactttgtcaaccctcccttgtgaagatcctcatcttcctgccatgcctgcccagccagactctagccctgcatcagccagacccactggtagatgtcggggcgatctcacactcggtcctggagctgcccaggaacctcactgtcctcctgtaatctccctcgctctccttggccacttgctcacctggtgagctttcccctctccaaagcgactccacctcctactccagatcctctccatcccaatccacagagggcatgggataaaggagaagccccagacaggaacttcttcaacttctgcctctggccctcaaagacgcctgcaaacagtgtcacctgtaaagctcttctgcttgggttttgtcctaaggagatgcctgttctcctcctcactcaggctggctcctcacagtctccaatcctgtcccatcctgactcctttgcaagcctcctatgtgggcttcggtgccccccacctcgaaagcttattccctcaactccacgggcacctcagtcaaacttccggaagatctccctccttgctcagggcagcctctttgcaccctagcctctgtctcagcatctgctagcatcgctctcgcagcaggagccgccctgctctgctcaccaagatgctgccagtgtagctgggccggagctctgcaccgcgctggagtcccgctctccccagagccccggccctgctgtgtgctgctcctccgtttctctgcaactccctcctgggcctctgaggttctttcttgtggctgctccataaaacttggtgatggccagtgttccacttctaccccagcctctttgctgccaccttatggtattctccctggtgatcaaatcctccctgaggtttaaaatacactgatgcccccagttctgtatctccaggctgaatctgcatcctgagctcagcttgtctgaatgctgtgcccactgtgttctctcctgcgggcttgctctctagctttctctctctctccctctctctctcaccctctccctctctctctttccttctctctctctccctctctctcttctctctctcctcctctccctctctctcttctctctctttctttctctcccctccttctctctctctctccctctctgtctctcccctctccctctctccctctctccctctcctcctctctttttctgcctcctctttatctctctctccctctcctcctctctctctgtctctccctctttctctccctctctctctccttttctctcttcccccctccctctctctccctctcttccactctctctccttctctctccccctctccctccctctctctcccccctctctccctctctctctccttctctctcttcttctttctctcctcctctccctctctctctgttctctctctttctttctctcccctccttctccctctctctccctctctgtctctcccctctccctctctccctctctctcctcctctctttttctgcctcctcctctttatctccctctctctctcctcctctctctctgtctctccctctttctctccctttctctctctccctctccttctctcttcctctctcttgctgtctctctccctctctctttcactttctatctccctccctctctttcctcctctcttctgtctctccctctttctctccctctctctctctctccctttctctcttccccctctctccttctctttccctctctctctccctctctgtctccttttctttcttcccccctccctctctccccctctccctctttctccctctcttcccttctctctccttctctctctttccttctctctccctctgtttctcctctcctcctccctgtccttctctctcctctctctctcctcttcctctctctctcctcttctctttttctctcccactttctctctctcttcctctttctctctccttctctctctctttccatctctcttcctttctctctctctccctctctctcctcctttctctctctcccctatctctccctttttctctctctctccctctctttccctttctctccctctgtctctcctctccccctctccctctctctctcccctgctcttcttctctctcctcgctctcctcctctttctctctctccccatctctttccctctttctcgcctctccttctctctttctgtccctctctttctccctttctcctcctcttcctctctctccctctcttttcctctctgtctctccttctctctctccctttctttccctctctctctctctctccttctctcactctctctctctctccccccacccccaccaattttcttctgacattttctaatctgaggttgcgttactccatgtgcctggagaagacgatggcaacataggattctgcatgtaaggattttcctaagggaaacagggttggaagaaaatggagggaaagtgggaaaagcctggagaatcatcaaaaggaggtgcaaacctgaccctaaatgaagggaagtgggagggaagcttgggtgggagccacctagaccatggtacagtctagggaacgtccaccaaggctgtaagggaagcctccagccaaaatcaaccagcagagtggtgccttctcccagtctgccagggcttgcctgtcttgggagccctgcctggctcagacatgggctgggagcagctcctgggaagctttggtgtaaacgctgctcagagcacagaagcttggtccagatccctgacgttggagatctgtcaggcgcattcccaggtcacggtagcgaaccagccccactgacacgggatgcttcctgcagggctccctggacacacattcacccccagtgctgaatccaacggattctttctgtactcactgaccatcctccttctccatggagggggttaggctccaggccctaggagagccaggctaagggaagagatgggaaaacatgaaattgtttgaggtagggggacatggagagggtagatgctcattggctgaagctgaggggcaggttaatgcaggaggggcaaggaatggcccccagccgctgtggcctgagggaggctgcttgctaccttgatgcaacttttaatcattatctcattttagagattagtgtatctcacactttgtcatgctgcaagaatgccgtaagctgcagaacttggcaaccagagatttctgggctctatttccagagaagttgcttttctaacaaattcccagtcatgctgatatcgccagcccagagaccacactacccaaataattttggtgagagccactttggactgccatccctagaggtggcttcttcttttctgaggaggacacccagggcccagggacatacgtgtttgccttagggagctcctggccagagccaggccatcctctcatcccaggcagctcagctccgtttgcagtgcctccatctgggggaagaaaagggaagaggtgtcaagcccagtcaaaggcaggagagaccaatgtccatgccggtctcatccctggggcctgttgtggtcacatttagtcctgccgcctactgggggctgctgaagtttgccaagggaagacattctcttgtcattggggtgacactgcaaactctgcctcctgggttcaagcgattctcctgcctcagtctcctgagtagctaggattacaggcatgcgccatcacgtccggctaatttttgtatttttagtagagacaaggtttcatcatcttggccaatctggtcccaaactcctaacctcaggtgatccacctgtctccgcctcccaaagtgctgtgattataggcgtgagccatcatgcctggctgcaaagggcattttgaagctcttgtccctgatcaatccctccatgctgcagatgagggcacaatcaagggcagagaggggagagggaggagcagctcttagtagaaacggttttcttagtgcatcctgtgcaccggtggatatgcacatgagcattttctcttcccgttttgctccaaagcgtgtgagatgtttgtgctatggcaaatacaacacctgtaggagtgtgttatgggttgaactgtgcgcccccagaaagacatgctgaagtcccaactctcaggatctcagctgtgacctcatttggagacagggtgattgagatgtgatgagttgagatgcagtcatcctggagcaaggtggcccccagtccatgctcactggcatctttacaaggagacagccttgggaaggcacagggtggcagggagcatgccatgtgaagacgcaagtggagaggggagtgatgtggccgccagccggggttggactgcctggattgtcaggagctgggagaggccaggaagcacccccctcctgaggctgcagagagtgcatggccaggctgacagcttgaatggtttggacttctggcctccagaactgtgagaggatacatttctgtctattacagaagctctagaaaagtcataacagaaagtgtctgaggaaaggtgcctgggggttcctggaagtgcctggggattcctgagggtgcatgggggtttctgggagtgcctgcggtttcctgggggtgaatggagttcctgggggtgcctggcgcatagcaggcagggacagtgcatgattgttctgctggcagtactgggggctgggctggccaccccaaatgttaccctgggcatctgcttaacagcccaaacagagggaataatagaccctcaaagatggctccgtccctgaggcctagagggctgtgtgagagctgacctcaaggccaaattcttgccccctctctctgttggtccatgagccccaggatcctcttcctggctctacactgaagcctggacttggaagctgccatcctaaggcctgcatttaatcaggagaacctgaggatgtctaagccattagaataaatcacacagatattccttttggggtgtttgcaatcacttcataattaactgacggcttcatagcagccactttcacgtgtgtccaatggtcacataacaacatcgcctactctgtgtctacaccacggcagcgtgggagggctggacgctgagggtgcatcctgccacctctgcagccccggagccctcccccagcaacaggggttcgtgggggcctgggcatcagatgggtgctcagtgcgcctcccctctcacctcatcatgaaacctactgtgggtcctctcgcaacagcagcacccttggtgaccgcctgcggatgggccactgtaccggacattgtgctgacaatgtccacgttgtcctgtggattttacagcaaccctgcagaggggagtctgaggcttggaaaggtgacatgacctgtctgaggacaaggagtcagtgagtggtggggctggggctcagcctcagccgttaggctcccgagccctgctcacaaatcagtgtcctggggagggcagcatggatttggggtttaaccacctctgggctgtctttctgcccagcactaaccctcggtgtccccctgtgggctgcagaggggctagggctggggacaaggtgaactgcccactgtctcttagtgagataaatggaaaatgaataaattccctgaggtaagtggtcaggcaggacttgcaaaaagtgaaatgattcaataatttgatttttaaaattaatgaatgaattaggactctttttgagacagggtctcactctgttgcccaggctagagtgcagtgatgtgaacacagctcactgcagcctcaacctcctaggctcaaggatcccctcaccgtcagcctcctgagtagctggtactacaggcacatgccaccatgcccacctaatcttaaatttatttttaatatatttaagatggggtcttgctgtgttgctcaggttggtctcaaacaccttggctcaatccatcctcccacctcagcctcccaaagtgctgggattacaggtgtgagccacctcacccagccaatagtaagattttgctaatgattttagatgctccttcaataggttccctctctagctttccccaactgttgccttccagtgcagctgtgaaagggaaccaagagagcccccctcccatccccgctctccagaactgcccactggtggaactatctcccgcccctcccctctccccatccctctcccattcagggcctcctggaggtcgggtgtgccacacgtctacatgcgctgttcataaccagagggtctgaagtcacacgattcggggtccagccgcaactctgccccttgtcagccaagtgagctcagagaattcacttcttctctctgatctccaccttcccatctagaagatgaagacacaaaacagttttccttcaggtggctcattgacctactctacaaatatttcagagccttttctgccaggccctgttcaaggctctgggtataaatcaacgaacccaacaaaatcccctgctctagcccaagggaggtgagcaccaaacaaagtagagtatagggttagaaggaagacaaagcggagtggaggcgtggggtgcccccgcacagtgaagccttctctcccgcggcaggaacccctgggctgcagctggggaccgcgggaccgtgtgcaagacaggagcactgagcctggagagggagtcccaaggacttcgtttgagtccctgaacacagcgttgcctgaagggacatctgccctcctggtctttggaattcttgaagctaattcactttccccaacccctaccggactttccctttttatctaaatcagagttggttttctgtcatcgtcatttgagagggtcctggctcaggcacgtgcttaaatgcttctagtttgtttttccttctatttagagggtacgatgatttcactgtgcacctgcagtgggggtctgagtctgcaggcaggaggagagggctcgctgctgagtgatgagcgcacctccccgtcctctctctgtctggggagaaccaggcgagggaggtccaagccctcacacccattgggagctcagcccccttttctgagagcacttccgtgtcaccgtgtgcctgtggactcctttattaattgctccttagagcctaaaacccagttcttttatgaaaattatgaaaccatcaagcagcctgacaatgaaaataatgcctctctagtatcaatgttgtaacactccctcccgtgtttctgagcaatgcattcatccctgtgagtgtggagcaggcaggaacctgagtggcgtgaataatggggccctccgcagcctcctacaaccagggacagggctgggagtggaaggcaaagcgttgttccatcaggaatagattattcataatttcatgcccttcggaccagccagggtcattaatctacggagagcctcaagtcctagaatggtggaagccttgaccgcatgcaatgcagtgcatcagagtcctggggtggagaccatcccatccttcccaggccatgctgggggcggcctccaagctcccacctgcaaaccggaatagagcgagaatgttctatggaggtaacaactttggacataaacatctgtcatttgggcttgtgcaggtggagttgagctcctgtatatcctgttcagaaggggaggacttggggtcagaggaagtccgtgctgtgctcctcctaggaccccgcaccttccctgtgctgggccgcgggtgtgcgcagtctgactccatggcacacgctcaagtggggtgtgtgcagtgcaggaatgctgttttgggggcgggggctttgcgccactcctgcagtggggaagggggatgtccaacttcagcgcacagtggggagcagctggggcaccgagagctccttttcaggattcttatttgataggcgagaaaggagggtgggagagtccagccgctcgcatgaggttgcacagctggtaagggtggggctgggagacacaacctgtgcccagggcctcactcttagtcgccacccctgagggccttcctggcacacacactaggtgtccagttctgttctgcatgccggctgtccccagcagggcccaggtgagcacatggtggggagagggctgaggaggaagatgtgatccaaaaggtcagttctaggtgttgggagaagcagtaggtgtggagagggggtgagggagccctgacttcctccccaagcaaggctttcctgcacaggtttttataggggactctgacagtagacgactgtggggtgactgagtgctgccaagctcaggaagctggcggcagggggaggacctggaaatgccttccccggaggagcctccagcgtggagcagcagacaggcagactgtaaataacagaggagggtaatgggaatacagcagggaatacaggtgtgacgcctgcaagagccccaccacatccattctgggagatgcccccccgccactgccagccctgtccagcctggaggggggccggaggaagacagctgaactacgcccctctgattgagcagagggcaaacatcccctgcctttgttctccttaatctaaattgaatctggggagggggacgattgcaaggtggaagtgaaaacccagctgcatttcaaaattacactgatcaaaatggaaatggtctggaggttttgaggagggatggctgatgcaggtacaaaccttacttcacattaattggcacccttttcagggaggaaagggcaggaataacttcataatactataaaccaagactgtggccactgccatctgtgctaagaagccaagggagactttgaggctggaatccttgaccctcattgtctagaccctgaggcctgcagaggtccagaggcatcccctgctgcgtcttctcaagagtgaagatctcctgccctgatctcacagccttctctgtcccctctgacactctttgacccaagtctcaacagtacctgcccggttgtggaggcaaaaggtgtagaagaagggtcagtagcttggaactggctgtagcttggagcccagccctacctccatctgcttcaaggccttccctgagtcattggcccttacagagagcattctcctctctccacacctgcccagtctccagggactgccctgccaacatcctcaggatcactcattttggtcagcacagcaaggtgcgggtcagtgtctccaggattccagaatccatcccaggagctcaccctcacactccttcccttagagcatataggaagatatcccctatatacacacactcttatctctccttgaaattaagcagtattcactcagcctgcaggaaagtagtccaagactttttttcatgttaatctaaattaaatctgcaaatggaaagaaggcctcatgtgagaagaagccaacctcatccagttgctggccgaatgttggagggagagcgagtgcctgggtgagcaaacgcgtcgttgtgaaatgtgcatcctgcgcaggaccatgtgcacatgtgcaggtgtctggggagggagcttgggccatgattcccaacctgcctccagggaggtccctggcattctagatgttctgtgtttaaaaacagcctctccagtggtttcaggagtgaaaaggataaaatctaagagctgtgtgaccccaccctacctaaacctttccgcctaattaatccaggactcagaagcctcaggaccattgctatgcctctgaggcagatttgggctccctgaagcccacatggcccaagatagcttggtctgaaacctcagcatccgcctcactcctctgagctaagccgtcttggctccagagggtctttgacagagtgtgaataacctgggaggtttcatactcatcaacacagcagccttgggccggataagaaagggcttgctgcctggtcctactggagaaaacctggaatttgggccaccagatgggtgcccagggtaggtgggaaaacaaagttctccaagtgcgttaagctgctgatctgatggggctgccaggtaaagtacaggatgctgagttaaatttgaatttcatgttggtgatgaatctttttaagtgtaggtatgtcccatgcaacatttgaggcatacttatactgaaaaagtgtttattatttatcagaaattcaaatgtaactgggcatttttaatttttatttgctagatctgtccatcctagctgctgagggcaatggcatcttgcaaataagatgcagggagcagcgatcctagtgagtttccacccaaggatccagcctttcaggggacagtgcaccccacgccagctgggaatggctgaaacactgggccaaagccaccagttctcaaacgagttgacagatggaatcctgtctttattgatatctgtctagtgaggtcttccctgagactgctgtttgaaggcataggtgtgtcccaaacgtgtctgtgtgccctgcagggccagctcaaccccaggcagtgctaagggccaacaccttggggctgggcgccgtgttgcatgtctgtaatcccagtactttgggaggccgaggttagtggatcctttgaaccaggagttcaagaccagcctgggcaacatagtgagacctcatctctactaaatcaataaacaaataaaggtggtgcgtgcctgagtcccagctactcagaaggctgaagtgggaggtttgcttgagcccaggaggtcaggaggttgaggctgcagtgagccatgatccactactgtagtccagactgggtgacagaacaagatgctgtcaaaaaaaaaaaaaaaacaaaacaccttgggtttagttccacttttactggacacaatctctctaacactatgtgtcctcatctgtaaaatggggtcaatcatctcttctctactggtcccacagttgcttgtcacgaataaatgataagttttaggaaaatagttggtgaactgtaaaatatttcaaatcaaacatcctacagtatttgtgttgctgtcaaaatacgactattacattcccctgagcagagatgtcttacttggttcctccctccttggtgggagcagccccaccttaccaaacgggtttcccagaaggctgttacagaaggtctcggtgcaggatgggcttgcttcggtcacagtggcatggcagccccaccacggacatcagcagccaagcctccaccagatgctttgaccaatgttgcaggcaataggaggcactagggaggcatcagcacaccccagcttggactgtctgtttttaaataaaataaaccctgagccaggcgtggtggctgatgcctgtaatcccagcattttgggaggccgaggcggggcagatcacctgaggtcaggagttcgagaccagcctggctgacatggtgaaaccctgtctttactaaaaatacaaaaattagccgggtctggtggcgcatgcttgtagtcctaactacttggcaggctgagacaggagaatcgcttgaatccgggaggcagaggttgcagtgagccgagatcatgccactgcactccagcctaggtgacagagcatgactcagtctcaaaaaataaataaataaataaataataaataaataaacctgcaagggatgcagcatgtcaggaacggatataattttaagtgcttctaactgaaatatgtagattgatagctgaatcacaaggacatctcaacatacatacgtttattcccacactttcaaccgtgtactcaacacacctttcctcagcccacagtgagtccggtcttccctctgggaagccgaggcaggggtgctccaggctgctccacgggagatcgggggctcctcagacctcccctccccaggcctagcgattcagtgtccagcttcaggtcaggcccggccccactccccacctgtctttctgtctctgtctttctctaggggtcaggcggagctccaccagtgtctccaactcaggtgctggaaaccagtcacagcactgggcttggtgacaccaggccagggacctagcagaccctgtgtagagctgatttcttgctcctctacacagggggtggggctgctgcccttcagcagagcctcggctttcatttaaagccagcagtttgagccctgccacaggacatagtcagagctttgccgcagcctgctgctcccggggaggcttccctgattgctgcagcttacaccacgctccctgcttcctttctgcttctcagtggacacgggtcagctccctcatcctgcctggggcgtcctcagctcctgggcaaggccagcagctgctctccatgcccaccgcaggggtgggaacacagaggtatttaggttgcgactcaattagaatttttagaaatctccccctaagtattttccaagctagtgaagaaacagaaacccataacaaccacgaagcagccgtgtgacagcagcacgctatggtactggagcaaggagatcagccctgtgctcaacaggataaattttttttttttttttttaaagacggagtttcactcttgttgcccaggctggagtataatggtgcgatctcggctcactgcaacctccgtctcctgggttcaagcaattttctagcctcagcctcctgcgtagctgggattacaggcgcctgccacttaatttttatatttttagtagagacagggtttcgccatattggccaggctggtctcgatctcctgacctcaggtgctttgcccacctcagcctcccaaagtgctgggatcacaggcgtgagccacagtgcccggccaacagcatgaatttttaggaccctgcaggaggaaactgtctggggcgcagaaatgggttcatttccacccaggaagctcagctgcccaggaaggtcacagaactgctcgtgcctgctagactgggataggacagagcagggacagaaggtgaagggcagatgccttgtgcatttgggaggagaacggagctgagaagtaggcagtggtggccactttcagccacagcttcaccaggctctaacatcagggggcacaggcctggtgacagccccaggacctcaccacctgggtcaactaccccttggcaatcttctctaggctttgtggtctttgtgtcactctgtctcctctgtggatttttcattatgggcgtaacaattactggattgatgcgtcgcctttgaaagccttgttggaagcgtgtcgctttggagaaatgtgctcaggggaagccttgaacatgcattatccgccccccaggtaggcaggcccctgtcttgagagcacacagggcatcttctcactccttagatctcctgagaggtgcctggcgctggggtgttatcaaccatggtgatgtgatgggagaggcgcaccagggagtgcagggaagagcaggctgacttctggctctacgaagctggagaaccctgctagcatagcacaaagagcgccggactgggtgccaggacagcgggtcccaggcttgactctagctgcgtgtcatttggcattgcttcctctctcagtgtcctcatttgcataattaggagacagaatatttttccaagagttgctcattcattcatttaagaatattgcagaggccggaagtggtggctcacgcctgtaatcccaacactttgggaggccaaggtgggcggatcacctgaggttgggagctggataccagcctgaccaacatggagaaaccctgtctctactaaaaatacaaaattagctgggtgtggtggcacatgcctgtaatcccagctactcgggaggctgaggcaggagaatcgcttgaacctgggaggtggaggttgcggtgagctgagatcgtgccattgcactccagcctgggcaacaagagcaaaactctgtctcaaaaaaaagaaaaaaaagacatgtctgtaattccaacactgtgggaggccgagggggcagatcattcgagaccagtctggccaacatgccaaaaccccgcctctactaaaaatacaacaattagttgagtgtggtggcacgcccttgtaatcccagctactcaggaagctgaggtaggagaattgcttgaacttgggaggcagatcgtaccactgtaatgcatctccaaaaaaaaaaaaaaaaaaaaagaaagaaattgaatattcctgggcgcagtggctcacgcctgtaatcccaacactttgggaggccaagggggaggatcacttgaggccaggagttcgagaccagcctggccaacgtggtgaaacctcgtctctactaaaaatacaaaaattagccaggcatagtggtgcatgcctgtagtcccagctactcaggaggctgaggcaggaggatcattcgaacctggaaggcggaggttgcagtgagctgagatcacaccactgcactccagcctgggggacagagcgagactccatttatgaaaataaagaatatttattgagtgccttttatgtcccaggcactaatctgggcatttgagctacaggagtgaaccaaagaaccctagtgcaggagcaggggagtgctcaaaataaaacttgaagcagggtggtctggagaggccccattggaagactgtctcttagcgactttcttttccttcaacccagcaaggccaggcctgtgggtgaagagttgttcatttacaaatagactaggccaagaaaatcttaccctctttgcaagtgaagatcaataactcatgaattcaaaactaggtttgtgaacaatgatgcttatgttaatttaattttatcagtaggtttaataatgtcttattaattcaatagaaggctttttaaaaaaaataatgaaaagctgcatttgaattagtcttgaaccaagcagggcgctgaccttggtctcccctgacgatccacaaataaggcttttttgtggacgagtcgtgcctgctccctgccatgcatggttctttccatcccgccccacactggtttctggcatctggcttcgcctgtctgatgcaatgcagagaaagagatccagagggaaacgtggaaagtgggagatggggtggaatgtgtggagggagacttactctcaaggaagcagaaagcagcttcttcccagaatctctttacaattggagaggccccatcagctgtggggagggagggctgctcacacctgcctgtgggcagcaggtagaataaattatttctagaggctctttgagcaacactggagtgaaattaggccaccttccacaattctaggatcctgctgtctacccccagagcctgatcaaaacattactccaccaatcccaccaggtcttccagggctgtggggagaaatgtctttgttccggataaccagagctgtgctacggcacctctgcaggatggggtagctcagagttggggaccccagcttcctctctctggcagggttggtctctggttagacgtgctactagggagctaggccacgtggacatcacagacaggtgcaggcatttggaggagaggatcacagcagattccgggaagttggtgcccttggggcctggcctgatctttcctgttaagctgtattgtaggctgagcaccagccaactccttctactgcccaagaagggaaggctggagccttggaagtctgctctagataggcctgctggatgtgagaagaaaccaggcaggatctgaggaaaccactggtgctggctgcggagtccagagctgatctcctgaagattaaaagttatatcagtaaggagaaagttggagagcggccctttgggctccagaatcagctgaattcaggagacaggttttgggaggaaagatcctaagcctagctaactcactgctcagtcaatggtggagaatgactcatcaagagtcaagataatgaaaggtggtggagataaagaggatggtgatggtgatgatggtgggaataaagatgaggacaccattcctttcctctgtattcaattccttgccacatgggcctacccaacatcatgtgttttttcatcaaagccagcaaggcagagaagcaataaagtcagctagcaagatggaaattacagtcttttgtaacctaattatgaaagtgacaccacatcacatgtgccatgttcttgcttttagaagcaagttacgagtggccaggccagcccacattccagaagaggggacaactcaaaggcatgaatacgaggacatagggattattggaagcttctatggtttgaatgtttgtgtccctccaaaattcatgttgaaacgtaatcctcaatgcaacagtattaagagatgggtctgttaggaggtgattaggctatgagggctccactcttagggttgatatcagcgtcctataaaggggcttgagggggcaagttaatccctttcatctcttccaccatctgaggatgcagcaaaaagtgctaccttgaaaacagagagccagccttccacagacaccacatctgctggctccttgatcttggacttcccagcctccagagctgtgagaaataactctgttgttacaaatgacccagtctaaggtatattgttaaagcagcacagaacagactaggacaggaggcaacttagtctgtccactgcactaaccctctagtcaaattcagtggtgtaagggactccagatgaaatcagcagagatgaacagcccaaacaactcacagaatggtgagaaaaaaaatgctcttttcagctgctaaattttgggcttttttgttatacagtcagagctaaatgcagtatttcaattttgtgtcagaaatggcatcctgctttaacaaaaacctaaaacgtggcatgaaccttgagactaacaagcagacaaaggctgaaaaagcagcttctggaaaatggctggtggaggctgaaagttcctacaggaagctggggggaggatgacatttgtggtgtaatcatggagtactgaatagccatgcctgtggtcagttcaaagatagaaatatacctcatgaatttgtagatagggctcaggagatatccaggcagtatgcagaatatatcagttggctttttatttctcatatgcatttgataagatatagaaagagggggataaagtgaagaagggactgctgaatttgaaagcagaatttagaaaaaatacaaaagaaccaggattttctgcagtggaaaataaaactgttgctcaacttcagtgtttttcaactagaaaaatatgctctgagtacattaaaacctgggtgaacttggaagggtgctaccagcaaaatatgccctcagggtcaagattaaattaagggtatagtagggaaggtcaaatgcaaacttctgacactgtccctttggtcaagacagtaaataagaagcaatgccacattccaggtaaaatgtcaggaagcagagctcccctcaaagattaaaagatgcaatggttccccctatattcctgagtttaattcactaatacagccatttaagaaccagaggatacatcaggaacacagatggtcatggtatatcagagaagactcctgtggtaagcttaaaggcccctgcctatacctaggccctaatctctgtgagtgttgcctttgtatggcaaaaggaatttgcagatgtaattaagttgaaggtctagagatagggagactatcaccagttacccaggtaaaccctgaatataatcactcatgtcctactaagaaagaggcagagggagattagaatacagaaaaaacattgtaagttgggcaaaggacatggacacttcttaaaagaagatatacacacacggccgggcatggtggctcacgcctataatcccaacactttgggaggccgaggtgggcggatcgcgaggtcaggagattgagaccagcctggctaacacggtgaaacccggtctctactaaaaatacaaaaaaattagccaggcatggtggcgggtgcctgtagtcccagctactcaagaggctgaggcaggagaatggtgtgaacccgggaggcgaagctttcagtgagccgatatcgcgccactgcactccagcctgggcgacagagcaagactccgtctcaaaaaaaaaaaaaaaaaaaaaaaaaaagacatacacgcagccaacaaatgcatgaaaagaaaaggtactcaacatcactaatcatcagggaatcgcaaattaaaaccacactgagataccacgttacatcaatcaaaatggctattactaaaaagtcaaaagacaaaagatgggggtgtggaggtggagaaaagggaacacttatatgtgttggtgtgaatgtaaattaattcaacctctatggaaaacagtatggagacttctcaaataactaaaaattaagttactattccacccagcaatcccgctgctgagtatctacccaaaagaaaagaaagcattctattaaaaagacatctgcactcagatgtttactgcagcactattcacaatagcaaagtcttggatccaacctaagtgtccacaaacggtggactggataaagaaaatgtggtacatatacactgtggaatactatgtagccagaaaaactaataaaatcatgtcttttgcagcaacatgaatggagttggaggccattatcctacatgaactaactcagaacagaaaataaaatattaaacaaggccaggcgcagtggctcatgcttgtaatcccagcactttgggaggccgaggtgggcagatcacttgacaccaggagtttgagaccagcctggccaacatggtgaaacttcatctcaactaaaaatacaaaaaattagccaggcattgtggcaggtgcctgtagtgtagatgctgaggtgggagaatcacttgaaactgggaggtggaggttgcggcaactgagatcgcaccattgcactctagtctgggtgacagagaaagactctgtctcaaaaaataaaataaaataaaataaaataaaataaaataaaataaaataaaatattaaatgttctcacttaaaagtgggagctaaacaatgggcacacacagacataaaaatgcagagaatagacactggagactcctaaagtggggaggttgggagggggaatgagggtgatgggtgcattagaagctcacttccctccattatgcatgtaatatccatgtagctaataagcacatggacccccttaaatctaaaacttaaaaaacaaacaaaaaaggaatacagaagaagaaggaaatgatacaactgaagtcaacactatgctactgcctttgaagatggaaggggcccttagccaaggagtgaagctctagacagtggaaaaggcaagaaaacttatccacttttagcactgctagaggcagcatagcccactgtcaccatcatttcggtccgaagaaactaattttggatttatgacctcccaaactgtaagagaataaatgtgtgttttgtttgttgttgttgttttctgaaatggagtcttgctctgttaccaggctggagtgcagtggggggatctgggctcactgcagcctctgcctcccaggtgattctcctgcctcagtctcccaggtagctgggactgctggtgtgtgccaccacgcccagataatttttgtatttttagtagagatggggtttcaccatgttggccagaatagtcttgatctcttgacctcgtgatctgcccgccttagcctcccaaagtactgggattacaggtgtgagccaccacgcccagccaaatgtgtgttgtttaacaaatttatgttaatttgtttcagcagccataggaaattaatacaaccacccaaaacttacctaagtggtagccccaattatagcagctgtagcagatattgtatttttactagaatagaccaacccaacctctgacataaataacagctattggtctagtgaaagcatccgtttcaattcctatcatcaagacagatggaagacatttgcattcatttgaaaggacagcagcagacactcacagtgttggcaaacctctgggttaacgctcctgctctctgttgcaatatagtccagttagacctgtcctgttggcactccacggaatatcccactagtccataacattgatgacaccatggtaactgaatctagggggtataaagtggcaagtactgtggctacaccagggggtgggagataaaccgtttgtagattcaaggtgacttgtggaatgctggaaagtgcttctcccttgcaactcttactgcaagataaaggtgcaactcttaataagtctcttacctttggaagcagcacacaccacacttgggaacctacatcgctccactcattaaatcactcagaaggatgctgcttttgaatgaaacccagagcaagagatacctctagagcagattcaggctgcaatacaatccccactgccagtgagtcacatgacagaggactggaggtatctgtagcaatcaagatgtggttgcatcttaggcaagtcctaacagaagagtctcagagaataaccctggggttttgcagcaagtccgtgtcctcttgtgttagtctgctggggctgctattacaaaataccacagactgggtattaaacaacaaaacaactaagcattaaacaacaaaatcgtattttttcacaagtctagaagttagtattccaagatcaaggtgctgtcagaactgttttctggtgaggcctgtcttcctggcttgcaaacagctgccttcttgctgtgttctcacatgggctttcctctgtgcttctgaggaaacagagagacctctctcgtctctcttccttttcttataaggacactggtcctattggatagggcccaaccttatgacctaatttaaccttaatgatctccaaacaggtcacataaggtttcaacatataaatttgagggggactcaattcagtctatgacatatctgcaacagaaaattatctacaatttaaagctcctggcatactattggaccctaacagaggctgcacacctgatcatagggcatcaaatttcttcccaatatgatttgagttttgcctcctgagctgggtgttgtcagcccactaattaataaggttaggcaggtataacatcattttatcatatagtggcaataaaacgtttgggattagactgagtagatccagaggacacaaataaattaaactaccacttggcccagaccctcacatcccctatctttgctgcacagatgggtcttcctcattccatatctatggctttatgaatgtttactaccaccagctgaaaaaggaggaaaaacatgtttggtccactgataagttaggacaatatgttgttacaagcccaaaatggactgttgctaccctttagttgcatttcagaagtaaagaagacttctcagtggctaggcttaagcagtacacctggttattagcttgtattagagtgagaaatgacctaagataagaatattcaggacctttggctattatgaatggctttgctggttgttcaggaactttggatggggttggggggctgcaagaggggaaatgtcccaggataaagtatgcagatgtatctatgagagtggccttgaggtgtgaagatagttctatcacatgctcatacccactggagagcacagatgacagaggaggcactgatcaactaagtagcttagatgatcaatctttgcccactccagtgcctgtaggatgggtccatgagcagagaagctacggtggcagtgggtggcagtggtgcaggttatgtacagttccaagtgggctcttgctcatcaggactaatgcagccactgtcattattgaagatctgatggatgagtactagatgccaaggttgagccctccatgggtaccagctccaaagaacagtgtgccagtgggttctccagaaagaagatgtcaagatggagtcagcaatacaaaagaattgttgggggtaatgcctgtgaaagatagagggaagagggggtagactaggaagggcaagcctgccagatgtaaggcaaactttcccaggaggagtgagaagggaggagggctgggtaggacaaaattccatctgagacatgagaaataaaaataaaattctaagcctccacccaactgaatagtaaacctcctcttggttaaagggaccccagagtgaccttgcaaactgaattctcgaccatgacaggagggaggtcggacacacctcattatgtcccctcccttgctaaccaccactacaccttcttccctaagaaccaaacagaaaccagccctttcaacagactccacactggtatcaaccaaccacctaatgctgccactgtcttttgcagtttcaacacaactgacccgcatttttttcccaacaagagaccactgatcatggcatggttctggtgagtctatggagaatgcccagtttttgcgtcctctgcttcaccttttaatgtcagagggctgaaaactccaccttggttcatgctaacaccatattttgtacatgggacccatgaaggggcatgaagctccattgaacatgtgcgcatttctcctttcataaatattcatgactactcctatagcttattaaatatgtatacttagccatcctgctcagcatagatgtctgttcctttttcttctccctccaagggttggtttttcatttctgatcagaggctatgcttcctggcccgtcagaatgaccaccctgcaggctgcaaccctttataagaaataaagctctcttttccaaatttatgaacctcatcattcttcaggtggcaggtgcaactctaagaatgtctctgccagcccaaagggaagttctggcagaaggactgatggctaggaatggtgcctggttccactgcatgaggaatctttggtttagcttgaaaccagaggtaaattctgaaggcacccatagctggaggctactgtcagttaactgagcttctatgactgccacagttaccagctagccatatggtggcaagtggactctattgggcacattgccccatggaggaagctgtgtttcaccctcacttgggactgtttcatattcttaagaataatttggcttctctgccggaagagtctcagtgtctggttgttcagagaatctcacatatcattggctcccaccaagggaccaaatttacaatgaaagagtttccacaatggcagataaccaaggactccaatccatggtatgtgcattggagccagtttgtattggcttaggagagttggctgttaaatattcaagaattttgagaggcagttgtgaaatctctgggtgattgaaattggcaatagcgaaagcatttacataacaaaacttgggcaatctttacaaatcggacatccctcccccttcccctacacacaaaccagtttacaaacacaccactgagaccactggtgctaatacactacatcacccagagctgccagcagcctgagaaaatgctgaaatggccacttcaaggacatgagcatcagattaggaagagtcctttgtgggtttaggggtggtatttttcaaaatgcaatctctatttggaaccaaagactatgtatggtactgtgtccacaatagatagggcacacttgtctgggaaccaaggagtgaaaataggaggagactctgctattaagtcaaatggcccacctggggaatttctgctgcctgtccccaaagcttcaggctctgctgggctagacaccctggaagaaacactgccaccagggacacagtatggattccactgaatctgaagctgcagctgctggcttgtcatttgcagttccttacctcagtaaacctgtaagcaaagaaaggagttaccagcctgacagggtattggccaagcttatcatgaatgacagagttgctgctgtgtaggggaagccaggaggagtttttggagctcagggaacttacttgggcagcaaatcttgatgattccttgtttgttgataactgctaatgggtaacttcaaagccatggcttgacaaaggtatgagaaccaaatgcccagatccatcaggcatgaaagtccaggtgaccaggcaagcagcctatagcatgctgaatgctgatagatggtgataggagcatagaagtggtggcaaaggagtgagatattgaataggaagccccaacctcaggagcaactggccccagctatagcttgtcccacaaaatttcctgttgatgattgacaaactgtgattgaccatgaaaagaagttgttatcagggtaaatttaatgtgggtcacaagtggacctgaggggaaaaaggatggaccatggtgaatgctgttggtctcccatccatattcctcctagccatatcagtgcagtgagccagctgacttcaaattgccaatacctgtgtcttttttcaggaagactttttccaaagtcatattgaagccagtctgcctgcttgtagcacagcctagaaatccaaaaaattaatattcaccaggaccagctctccattgatgatatagcccccatgctaaaaggataaccctaagacataggttctatatcattttctagggggttcccacaggattcagctctagttagccacagttggatctggcttagtaatgaccctgccacaaccatggaaatagaaggggattcctttgttttaaggtctttcttttctctttccctttcccttcctttcctttcctttcctttcctttcctttcctttcctttcctttcctttcctttcctttcctttgtttctttctttcttttcttttttttttttttttacagagtctttctctgtcgcccaggctgcagtgcagtggtgtgatctcagctcactgcaacctccgcctcccgggttcaagcagttctcctacctcagcctcctgagtagctgagattacaggcatacaccaccacgcctcgctaatttttgtatttttagtagaggaggggtttcactgtgttggtcagtctggtctcgaactcctgacctcaggtcatccacctgccttggcctcccaaaatgctgggattgcaggcatgagccactgcacccagccaggttttcttttaaccttacagtcactgtctcacctgtctcattttcccactcccctatcagtgtttcagataccacccagataaataatttgcattttaatccttatagcaggatccacttctaagggaaaccaaaactaagacaagtggatgcaataaatatggagaaaggcagattccaaaactattttttgaataagatttgcaggtgggctgaatgtggcaactgaaagaaagagagaaaattgggaatgatgcctggatttctcacgtaagcaagtgggtagagaagggtatcatttactgagatgagaggtaattagaagtatagaaaattaagagtcccattttgttaacattacatttgagactttttttttcttttagtcagggtcttgctctgttggccaggctggggtacagtggtacgatcatgacttactgcagtctctacctcccgggctcaagcaatcctcccacctcagccttccaagtagctaggactacaggcatgtgccaccacactcagctcattttttacttctcgcttttatagacatgaggtcttgctaggttgctcaggctggtctcaaatgcctggcttcaagtgatcctcccatttcagcctctggtagtgctgggattacagacaggagccactatgcccagccatacatttgagattacgataagacatcaaagcagagattcaattaaagtcagagctagagatacaactttgggaagatggtaggggtcagaaaaaaattgggtgtcaccatgggactttctatgaccattaactgtggtcagaataagctgccctctgccccaggcactaacaatattaaagagagcggccgctgcgttggcttgggccccagagggaggacacgtggagcagtgccccgccctccatggacttggcccacagtgaagaataagtcttatttttgtaagcctctgtgaatcttagatgtcgctacaacggcagacactgcattactcttaactgttgcagaaacccctgcttattaaaacaagagggaagaggcaggtgaggaacatgatttcagttaggctgaggggtctgatgttgagaaaataaatgagttcacatgtagcattagtccagaggaaaaaaaaaacagtataaacaccatttccattccccaaatcagagcgctggaaaaagtcatctagcactgtttttccagctagtataacaggagtgtgacctttacctggactgacatcccagggtgtgtgtaatcaaatgtaaaaaattcattattgtgtcgactcttaattgattgtataacagagaatgcaggtcacacaggagccccagaaccgtttggctgggatttcctcatgcgctggttgttttgctgcgggtttactttctgctttcgtttttttgtctgctcacattaaaagtcttcattactcctgacgggcaggtggagacaggcagggaaggaaggtctgggttaggattctccaggcacgcccactggcagctaattgaaagccagttgcatcctctgaaagacctgaatggctgactgcctagaggggtgggattcccgcaacccacttccctattcagagcattcttcctgcacctgctcactgaagtctgaaatttgtttacaggagacacagacttttattcccagattagagcttaggcttccattgcaaaagtccagggagaaaggttgtgtctcctgtaaatgaggaggagcagcagtgcgtatggaggaaggaggtgcacaaatcaggccgaaacaggaaaacaactaagtttttacaacaggaggagtttaatgcagctaaatggttacagaaatcatgtaaacccagagattagtaagaaaagaaagacacgactttccctgggccagtgggatcaagggaggaggcagagtttgtgggaccgaggtcagccctctgaaactcagaccacagggacatcccgtgccagagccagagccacagaaaagaccagctgctgccagagaagctgcccgagacagggaggaaggggaagatacaccaggcttctcgcatcctgcagtctccccagtgcatctcatcgctgtccccaactggaggcaaaggcggaagcctgggaaaagcagcccatagcagtcagatcccttgctatgcagagcagagcaaaggaagggcaacatatgaatcagtgggaaaacagacacggaaagtgcagctcccaggacctggggtggctgcctaatgaaacacaattccttctgccgctgcacccctgccattccccatttttaggaatggctgctcccttctggcttccgctcctcagccctgatctagccatgagctctgaagaggtataaacgatcctattacagggccgggtgcggtggcactttgggaggccgaggtgggtgggtcacctaaggtaagaagttggagaccagtcttgccaacatggtgaaaccttgtctctactaaaaatacaaaaattagctggtcatggtggtgcgtgcctgtaatcccagtgacttgagaggctgtaacaggagaatcgcttgaacctgggaggcggaggttgcagtgagctgcgatcataccactgcactccaacctggagtgcaagactccgtctcaaaaataaaaataaaaataaaatcctattacagctgggtgtggtggctcatgcctataatcccagcactttggaggctgaggtgagagaattgcttgagcctagaagtttgagattggcctggcaacatagtgagacaccatctctatacacacacaaaaattagctgggtcatgttggcttgtgcctgtggtcccagctactttgggggctgaggtgggaggatcatctcagcctgggagtttgaggctgcagtgagccataattacaccactgaactccagcctgggtgacagtaagaccctgtctacaaaaaatggaaaaaaaaaaacaactgattctattgcatgatctcattcccagccctttgtgattggacaaaagatgggcacatgacctgggtgggccaatcagagtcttctctgggatttttcacactggggcgggtggagaagagtcctgtctgctctggttgtggagtggaaggacaggagtctgtacacccccatccttgacctgtgatgggaggcaaaagtgatttaagtagatggaacatagccaaagtccatgtgcagaggaaagtgaaaggaacgggagaaagacagagagggggactagagacccgatagcttcctgtgccctgactttgggaagggccaaggagagctccatcctgctccttcacagtgtggttgctggagcctatagatcactcttctggcttaaagtaggatatcattgttctgtccctgataactgcaacacagaaacactcagagcaagtgggagaaagaacacagggcctgacatcatactaaaactttcactaagaacaaacggggctgagagggcaaggaaggtcaggcagtccaattgcaaacaggcaccagcgagcaggtggctaggataccaatgtgcagagtcacagttttctcgagggtgtcagaggttcaaatcccagcttccttccaggcagggacggccaatgagaagtcagctgaagtcatgggacagaactttcgggaaagttctgtcaaagaggagaggggttgattgagaggacaggctcctttctctacacccatcactgccagactcacccccctctctcccttgcatcacacagattcatcggagaatcaggaacctgagggtccttgcccaagacaagcagagctgccaggaggagggagacaggatcctccatgccagtggagctgcatacagctctggctgctcacagctttcattacctgaggaaaaaatacgatgttttcattcttttgtgtgtttttctgttattttgttttatttaagccactaatttccacgtcttaactattcagggctgatagaattcctaattgacagaggacccacgtctgcctgctgtgttagtccgctcatgtggctatgaaggatgcctgaggctgggtgattgataaagaaaagaggtttaattggctcatgattccgcgggctgtacaagcagcacagcaccagcttctgcccagctcctggtgaggcctcaagaagcttctcctcatggcagaaggcagaggggagcaggcctcacatggtgtgagagggagcagagagagaggaggagtgtcaggctttctaacaaccagctctcccacaaactaatcaccaggaggatggcaccaagccatccatgagggatccacccccatgacccaacgcctcccaccaggcccaacctcccacactggggaccacatttcaacatgagatttggagggaacaaagcatcccaaccatggcaggtgactttttgtgagatgcctttttctcaaatgaaaatctttgctttcaggatctccataagagatccttctcctaggagaaggccacgtcttctttatgccaagggtgagcccagtgaggatgaaaaccccacttgaactgtggttcatgggccagggccacgagctagcaagggacacccagccggagaagcctggaggcctgcaggacccgcagaggggctcatgctggggaagtgatgtgcacgggatcctccagctctgagagacagaaagcatccagaggcactcctgcatgttcactgcagtcccaaatcagctcccttgcctctctaatcccaaacctggccaagggactatggggggttctttgactaatccactgtatcattagctccttcctttctgcgctggttaattttatgtgtctgcttgactgctgtggggtgccaagacatttggttttattaaacattattctgggtgtgtctatgaatgcattagtctgttttcacaccactgataaagacataccccacgctgagtaatttctaaagaaaaagaggtttaatggactcacagttccacgtggctggagaggcctcacaatcatggcagaaggcaaaaggcatgtcttacatggtggcagagaagaaagaatgagagccaagcgaaagtgaaaaccccttatcaaaccgtcagatctcatgagacttaatcactagcacgagaacagtatggggtaaactgccccaaaattcaattatctcccactgggtccctcccacaacatgtgggaattcggagagctacaattcaagatgagatttgggtggggacacagccaaaccatatcaatgagggtgtttctagatgagattcacatcaaaatggatagacaggataaagcagagttactcaatgcggcggcagtggtcagacgtggggggtgcggtgggggcagggctcatgcaatttgttaaaggcctaaatacaataaaaggctgagtgagaaaatattctttctctctgtctgactgtcttagagctgggatgtctgttgtatcctgcccttggacttgcatttggactgaaactgataccatctgctctcctagttctcaggcccttggactcacactagagctaaaccattggctctgttgggtctccagcttgatagctgtaggacttggacttctcagcctttataatctgagccaattccttatagtaaatctgagccaatagtaaacaggagctgattccctatagtaaatctctttgtatatccacgtgtctacacctatatctatatttatttctatgctactggttccattactctggagaagccaggctaatacactccccaagacaaaggcccagatcaaaggagaatgggggcagcactcccagcagagctcaggctgctgctttttaccaagacccctgccttcaaagaatctgatcttcaaatctcactgagggctgagggtgtcggaattattcacacaagggcatatctttccagtctcacaaggattcagacttcttatgtttattaagacaaaaatcctttaaaaataatagtctgttaagatttgcttccagtgctctgttccccagtgatggccctaaagacgtgcagtagagagagaggatcctacaggaagattcagggaaccaaagattgtcgctgaaagaccaggcccagctgggagcagttttaatgcttctgtttacaagaaggaacgaagttcagaaaagttgcttttctgtgcaaaaatgtcagtgactgtgagctcagatgcaggggagtgcaaagtggttaatcagtgtcacataaaaataacaaagacccctgggggcccttaactcaaattttgcaagtcatgcaggatgaatggagaattcttcctgggccttttttaaaaaatctgtttttagtagtggggaggggacagtggatgggcaggaagaagattaattatctgtgatgaacagattggcgaggccgggattcttccaacagaacaagcctcattcatggggtccctcggaggtcatcctcccagtgctctcagtgtgggggtgtggggttttccacctgcccacctctaggagctgaatgcttcatgcagaaagccaacactttagcccagggtcaccccatggccgaggacagagccccaggcatcagggctctacatgaagcagactgccccccacccccaccattttcccttagacatctatggtgttgaatgtcacagcatgagcctgtgctgctccagaagatcacatgccacctgggtgtctgccagtggacctgggcagcccaccctctgctagcaccttgcctgatcagtcttcctgagggctttctagaaggggtcacataggagccagacatgaagcaaggcttggtggcaaggcccattgtccagcagcccctgccttgtccctcagctccgaggtgtctgtaatattgtgggactgctccaggcatgggttcaaccttatggcacaaagcctataagcctcagggcactccacgcaggactaggtttcccagggaacaggctctgagatggagagaagcagtcacgatgcttactagaagatgctattgggatcaatatctgttggatgcaggggaaagaagcaggattaggcagagggagagggagatatccggctgggattgggaccaacaaagactgcagccgccttgcagggagctttggagcttcagtggccctgcagagatgctcctgatgggggaggggctgaaactttatagccttcattgaccagttattgggaagcctatgtcaccttgggtgtggcttttttttttctttttctgtaatttttatttatttatttatttaagagacagagtctcgctgtgtcacctgggctggagtgcagtgatgcgatcatagctcactgcagcctctacctcctgagctcaagtcatcctcctggctcagcttcctgagtagctgggactacagatgcacatcactacacctggataatttatttatcgatgtattttttagagacggggtcttgctatgttgcctaggctggtcttgaactcctgagctcaagcgatccttcttcctcaggctcccaaagtcctaggattacaagtgtgagccactgcacctggctgaggctgttttcttcagcaaaaatactatacaaagcacagctgagggccatcttctgctgtcctccaacagcttgggaataaatccttggctgttgaaaggggtctgggttgcatatacagtgtcccctcaccctccctaggccctagctccaggaattctgtgaatgctctcttgggctccagctctaggcccaggagtcctctgccacaatgaccatactctaagcttgagctaaaacacgtaagataaaccatactttaccaaaggtgggattgtgatgaaagaaggagaagaggacactagctgtgaaaggaaagctggatgttctaaaggcaaacattgtcctgcccaggggcctttctacttttcatttttattttactttatttttctcttatttttattttattttattttattttgggatggagtcttgcgctgtcgcccaggctaggggtgcagtggcacgatctcagctcactgcaacctctgcttcccgggttcaagcgattctcctgcctcagcctcctgagtagctgggactacaggcttgcaccaccacgcctggctaatttttgtatttttcatagagacggggttttgccatgttgaccaggctggtctcgaactcctgatctcaggtgatctgcctgcctcagcctcccaaaatgttaggattacaggcacgagccaccgcacccaaccttattttactttatttttaatgcacctaactaacagtgaaacagataaagtcttgagtccacgggtcagtctgggtgagacttgcccactctctcgacatttcaccttctttcatggcaacattctggtggacaaacctcacattagacatacgctaaggcttcaaccctgagcatagcccattctccaaaatcagccccacccactgaccccactgggtatgcgatcgcctgtgtgacctcctagcaatgagtgattggatgagaggcgagcgctggcctcacaggcatgtgagctgggttagtccatcccctctgctacaatccacaaggggctggtgaagactgggtcacttggcagtgggacccgcagcagaacagtaatgacctagaaaggacccagcacaggccaccgcttggggtacgagtgagcagaggagcatcccagcagagaaaaggaagcttaagttcacagccggctggcaaggcgggaaagctgggagcagcagctgctgaccagccagcttcctggacacaggtgcctggcactgagctctccaagaaacttgccctcatgggaggtggccagggtgggcaaagggtgaattctggctgacgggacttgaggaattgccaggggcttcagataatcatttcttctttggttaaaaaagaaagacagctgtgtcctttagtccttcctgcttgtagatacagaatattcagatctccagtagccattctgcaaccatgaggcgagatggagagaaccccaaggaatgaatttggcagactccgagcttctaaaatcccacaaacatcctgcttttatatttaccaccctaatagaaaagcgcagtcctgtcactgaagtcactgccatcccaggagccttgacttacaaccaaatacttcctcgcagaacaggagcaaggatggctaccagggacagcaataagcgcagtttcaggagccccatcctcgagtcggtttcatggggagaatgtcaaagaagggctggtgcagaagcatgttcagcagtttcctcaggctgccacggcagatacataccacaaaccagacacttggacaaatatattctcttatagccccagagaccaggagtccaaaatccacaggtgtcagctgggccatgctccctttgaaggttccaggggagaatccctggcctcttccagctcctgggggccccaggcattccttggcctgtggaaacatcacttgagtctgggcctctgtcttcacatggccttctcgtgtatgtgtgtgtgtttgtgtgtgtgtgtgtgtgtgtgtgtgtgtgtcctcttcttagaaggacaccagccattggattttgggcccaccctaatccagtatgacctcatcttaattaacgtgcagaccctatttctaagtaaagtcacattctgaggttcgtggtggatatgaattttgggggatactattcaactctccaaacatggatgactatttccaggtcagtgtgaggcccactgctggtattttctaaatcactcagagaagaaagttttcagagaaccgaggtcctgccaggagccagtgaggtctgaattactgttgtttagaaaaccagaaaacctgctctgaccagagtgctctgagtcctggagaaacgcaggtgcctgcagcattgagcgcaacgcaggtgtgttttcaggactaatgaatacctgcaaatgccaccaagatcttggagacataatttctgctcagtcacacaagaaaaccagactgcaaaaggaacagggcctcgaggcattaagggagagttaatggtaccaggaggtctgcaagggtcgctgttgaatatcattctcaacgagctggtgggaattcacatgtctcaggcaccgcacagaacagccatgggcttgcctctcctctttccgagcagtgaagaagcagaggggccttcagggagacagagctgcctggggcccattgacattaaatagaagaaaatttgcatcttggccgaaagaaaaccaccatgccttaggctgtgaataaaagcacccagtctgcacccacacaatttagcagcaggttggagacccaaacgcctagaattccttggactactatgcaagtggccctggccagaagacattgaagaatgagagttggctcagggcttcagagggtgtcaacccatcatgaccatgctctttttacaaaaggaagacccaagaccagcagagaggaggcggtaggctgcggtcattgagtcggcccacagcagaaccaagtggagctgggaccatgtctctgcactcgggccacaagtttccctttgtgcattttttttttttttgagacagagtcttgctctgtcctctaaactgaagtgcagtggtgctcaccgtagcctcggacttttgggatcaagcaatcttcccaaggagctggaagtacaggcacatgccaccttacacggctgatatgtttattttctgtaaagacggggtcttgctatgttgcccaagctggtctggaactcctggcatcaaatgatcctcccggctcagcctctcaaaatgctgtgattacagacatgagccaccgcacccagcctgtttcccttctgaaggaaagtgagacatatccagccctgtaatattcctagactgggtaacagtcctcacagtcctctttctgtcctgtagagattttccccaaaataatgcccaggagcttcctgactatctgccaactgtcactcttgtcatttgaggcccggggattttggggacgtttctgaggttcactgtcactttcccatggcctgcacagccaaaatgcaaacatagccaaagccagaagccaaggatatagtgacaggacgttctcaccagggacgtacctgagcaaatgacgtccatcagcccagctcacagagacgcctgaggctcaattttgtccggagcccagagaaaggctgggtcttgaggggcagtgcctgttgggtgggagcgcctcatccagctttctcatttcaggtgggtaattctgagcccaagaggaatctgaaattcaagacaaagcttccaagagcaatgcactgtcttcattgtcttcttgactcttgatgggattatcttatttatttttgatgggattcactgcccagagtgttagaaatagaaaatcaaagacagaggtgtgaatcagagccgtgctgtggttttcttactcgcctgtgatcaggtgtgtgcacctagatcactaaatggaactgtgtcccgccccaccgctgctggctcccagccagaagcctacatatccccagggcaggacagaggtggtacagctgggggcaactggctagattccttacatataccctcactgagtatcaacctcatagggaaactgtgagactgagtttccttcttttaaagtaagggaacaatgagatcatacttgctcataattaactcaacatttgttaattaagaagccagacctaagctacagggtgggaagagactgggaagtgagaaaccaactggcccttgactttacagagctttgttttttttcaacttttattttagattcaaggggtatatgtgcaggtttgttacatgagtaaattgggtgtcaccgaggtttggggtacaaatgatcccatcacccaggtattaagcatagtactcaataggtagtttttcaatcctcaccctcctcccctccacaccctcaagtaggccctggtgtctgatgctgccatctctgtgtccacatgcgctcactgtgtaactcccacttataagagaaaacatgtggtcttgggttttctgtttctgtattaatttgctgaggataatgacctccagctgcatccatgtgtctggaaaggacatgatttcatgcttttatatggttgtgtagtattccatggtgatatgtaccatattttcttcatccagctcactgctgattggcacctgggttgattccatgtctttgctattgtgaatagtgctatgatgaagaaactagtgcatgtgtctttagggtggaaggatttgttttcttttcaattatatacctagtaataggattgctgggaagaatggcagtgccaagttccttgagaaatctccaaacagctcttcaccatggctgaactaatttacattcccaccagcagtatataagcattcccttttctccatagcctcgccagcatctgttatttttttactttgtttacagagcttttgcataagagagagataggatacaatcacaatagcaaatgggaaattgcaactgtggtcagggccatgacagagaggaagattagcaacttcttctacaagaggcccatgtgtgatgtgacccagtcaaggaagtcaaagtgaccttcaagttgaagcaggaatggtgagttagagattacttggcaaggaaggaagggaaggacactccaagcaaaggaacagcaaggctcgggaggatgcggtaagtgcaaagatggatgcagggcagtggggctggggggcaggggtcggttggtgggcgagatggccaaggtgagcggctctgtccatgcaggcagcaatggaaagcgatggaaacctcatgagtagatattgatccgattggctcatgcttcgaaataaataaagcaaaagaaatgttgggggtgagggcagcacacagggcctgcaaggaggctctgttgatggtccaggtgacagagaacttgaaatgcaggatcacacaggtagtaggagccaaagcctggactcaagctacagcctaggaccacttatccactgctgatgggaacgcacatcggctcagccagcagttcacatatttcttaaagaactaaaaatcaaactaccatctgacccagcaatctcatgactggtatagacctgaaggaatataaatcatcctaccacaaaagacacctgcactcatgtgtttaccacagcaccattcacaacagcaaaggcatggaatcaacccatgtgcctatcaatggtgagctggataaagaaattgtggtacatacacatcacggaatactatgcagccataaaaaaagaacaaaatcatgtcctttgcagaaacatggatgcagctggaggccattatcctaagaggattaacacagaaatagaaaaacaaacactgcatgttctcactgacaagtgggagctgaacattgaacacacatggacacaaagatggaaacaacagacactggggacacccagaggagagagagagagagagggagagggcaggggctggaaaatctacctattgggtactatgctcactaactgggtgatgggatcaatcgtaccccaaacctcagcatcacacaatacactcatgtaacaaatgtacacaggtacccaccaaagttaaaataaaagttgaaataaaatttaaattaaaaacaaagccaaagctagacccactgcactcagcctcgtaggtgagtgtcttaaccacatcaggaactccttgaggcttgctttggaaagaatctccaggtggggcagctcatgcctgtaatcccagcacttcaggaggctgaggcaggcggatcatttgaggtcaggagtttgcgaccaccctggccaacatggtgaaaggctgtctctactaaaaataaaaaaattagccaggtgtggtggtgcacgcctgtaattccagctactcgggaggctgaggcgggagaatcacttgaacccaggaggtggaggttgcaatgagctgagatcgcaccactgcactccagcctgggtgacggagtgagactctgtttcaaaaaaacaagaagaaagaaagaaaaaaaaggaaaacaaatctccagcactgtgccctggaagggctgtccaaagaatgacgtgtttgtgcatctccagggtagatctctgaaagaaagcatccaatatccagggtttgacatttcccaacagatagcctcaagctcccagtaagggcctccaggacaggccctctggggcgtcggtgctcccctgctctcctgggaagatgatgctgaagttcagcctcaatagcccactgctccttcagtcctgcgaggtgaagacacaacttccacataccacattgtctagagaaacaactaaattactagttttaagcaaaactggaaatcaacacctatccctaggtttctggagctaaatgggctcagagatgtggatgacagagtacaagtcaaaactccatgctgtaaaatactgcacgctttttataaatgttaattggttagagtatcataatttttacacacatgtaaataaggttaatgaattttattccacacagatgatttaaactataaaacaatcaaattacttttcaggtaatactttgggcccaaatgaaataaaatttcaagtcattataactttagaaaaagaaactaatttgaatatgtgatttagatccattaaaagtcttctcaactttaaatagtgataatagaaatcagaaaagctcgagagtggttaagattaattaagagtgaatgcatttgggaaaaggaaattatgaggctatgattttagaatgcaaatgaggtcaagaagtttaaactaatgtgcatctatataaacacagcctcaataaaggaaaaatatttcattacaagggtttataagtactgtattctctacttcttgttacatgagtagcaacaaattgataaacagcaacctgttgtcagctaattacagcacccttgtggctgccaatagttaagctggtacgaaattagaaatcttgattttcaaagttctatgcagcctggtttctttccttatgatgtaggcagtgctggtgacccactcaatcctttgaatccttttgtagtagcccatcttctatttcgtgggcttggttacaaaaggcccccacctgcaagggtcttcaggcgctttctcttgggctaccagagccacctcctccaagcagacagccaggaacgcctggaagctatgctccccacctccactcctcatcctggttaatcactggtatgagcttgcaaagcccaccttccttgccttgaggtggcagaaactcgggtatatttagactccagagcacaggatcaggctatgtgtaggaccttgccctgaaattgcaacactgcagctggacctgtgttagggtccctcgaagtagaccctgagaggaggatttttatgaaactcttttacagagaacactttctgatgaaatgtgtgcagaagtggggaaagcaaggaggagcagtgaagaggcaggcaaagatgtagtttcctctgaagtctggcctcagcctgatcacagagggtgctctgggaagggaggggagacagtaccgtccagttgtcccacttgagggtacggggtgctctttcatattcccatatcagttagcccttggctatgggccaatcctgggaaatataaactttgttaacccaaggtgattctctagagaatggtgagtcaccagcagcccagactcagcaaccgagggatctgctcccagctcagtgaagacaagctgggcgctcacggcctctgctcagtgttccccattcccgatcctgctcctctctagcctgccctttctctttcctctctccttgaaaactcacttgtacctgaatcccaggcacagcttcagaaaaacccaacctaggacaccctcctgctctaaggatcaagaactgcactgcgtttgatgccacagctttccttaacctgaaagctgctgttattttttttccttttttgagtcagggcctcagcccacgctggagtacagtggggcagtcacagctcactgcagtctcaacctcctgggctcaaagtatcctcccatctcagcttcttgagaagctgggaccacaggtgcacccccacacccaactaatatttatatctgtagagatggggtctcactatgttgcccaggctggtcttgaactcctggcctctagtgattctcctgccctggcctcccagctttctgagtccatgtgagggaacagcatttgtaggacggggctcctgcagctccttccagcctaatatccaggttccattcttctagtaacagtgacctgatttttctctgtggaaccagacttctgtcaatctaaaaagtttgtgagcatacagacacacacacacacacacacacacacacacacacacacacacacacacacactcttcagaagggcatttggcctaggcctggccaataagaagtgaggggttggctctgggataggcgtgtgatccaagctgagcctctgccctgggaatgctgctggaatccttgaggaggtggtgctcgcacatctcaagaggcagccgagcgccacctggccacaaacaggtagactctgcccaaggttgaggcaatcacagaagaaagcaaagccgagtagcagagtgtgaaggtgcatggcagcctcatgggagcctggagcagtctctagccctctgagttgtgggagccaattcagtcccttcagctgtgggagctgctcaggccacctggagatgagtttcagtcactcgcaaccaggtggccctcccctgactaagatccctgagaaggatctggtgaaaacccgctcttaggaaattgtctgttcctgagatgtgtgctgtagcattagaagtatgtgctagcatacttctggagtcctggcaactcacatgacctggatcaaggtctttttttcttggcctcagttctcctgtcatattacgggagtgtttggactgtgtatatcctaggagtcaagtcctcagtccaggactctatcctttatgagcacacgccaggtgctgggctctcccgtccaaccctccaggcccccaacactgtgagctctgaggctgagctttcttcacaagggcaaaatcctccccatacttctggccccacctccagggacctgtcttgggagagatttggggcccagcctagatgaacagatccaagagctggggccactccttggcagtcctctgtctgctggagtcacccttgtgctttttgtgggagcacgactctcattcatcatttcaccctccacttcatgaagccagcccaggggctctcccagggccgcgtagccccgtgcatggaaacagtcctggcagggaggggctgggtttgaattctggcttctgtacagagatgtgcaatcgatttcttcaacttttcaagcctcgatttcctcatctactcagtgagaataatgaacattagatgtgagtgtcttaggttgggttgggttgaactttctcagggttacataacttactgtagcggatgctgtcagactctgcccatagttccttgggtctctttaccagacccctgtcctcgcactcaccccgagccagaaggggtgtgtcttagttggaaggttgaccttaaacttccggaatctactttgtgtgcctttaaggaagagccagaaatacctggacatgtgcaccccctcaaccccaccccagccaacacttacccaatgccagacggtgtctgcatatacaggggtataaacacaccaggcctcttgccctgggtgtgggcagccctgagatccaatgcagtctccaaagtcatccactgtgagacttggcttcataccacatccttgctgggtctccctttcttcccagccccactttctacttccctcctggatattcctgcggacagctcccactagggaatcctcacaagcactgtcttctctggaatggggaaacagtcttaggtgctcccatctgatgtgtaatggagtgccctacccatcacacctgttcaagcagtggctgctgccatggctggtacagtccagtgctggcatgcatacacacagtgcacaaatccctggggggggtagacacacacgcatgccaacacacgcacacacacacacagtgttcattcctggtggagacaagatggcgagcacacctgagatgcagtgtagtgatcctcctctaagtcatgtctgagagccccatggaaacaacacgaccgtgaagctaatgcaagaaccaaatccctctcactttaagaaacctatcctcagccaagtgcggtggctcacgcctgtaatcccaacactttgggaggccggggcaggtggatcagaaggtcaggagttcaagaccaacctggtcaacatggtgaaaccccatctctactaaaaaatacaaaaattagccaggtatgttggcaagagcctgtcatcccagctactcgggaggctgaggcaggataattgcttgaacccgggaggtggaggttgcagtgagccaggatggcaccactgcactccagcctgggcagcagagcaagaccctgtctgaaaaaaaaagaaaagaagagaaacctatcctcaggcatgtaatgaaatggcctagggcagttcttcacagcacctggtagcagcagcccctccatgtgtctatgagatgcttaatcagacagcacagtcatctgtcacatttctatttccctttattttccagaaccctattagaaaggtcaggcaggatagaaacagggttaaggagagccatgaggaggcctggaggatattcagtggagacaaggacctcccaaggcttgaaagcatcaagaggccaccaggcaggggtcagcaggtgctggttgctttgagcaccccaagccccagcctggatatgtgtgtcaggggctggtggggaagctgccgtgcaggcgggactcccatgggaaggcacctgggggagtcactctgcctctcaacccctggtcaaatgaaggctggagtgcagagatccactgtgtctaggacacctgcttcagagggacactaacgccaaaggaaacagttgagagagagtgaaatgggagggaggatttacaatgtgatttaagcgcctggattcagtcacacctgaaacccagaacttcttgatttctaggccagttcgttctctttgtagcttcagccagttgaagcaagaccttgtcactttcaacagtgattgtgggtgaatgatatagtgattggaggcccagagctttgtgtgggcacgagtggagccctaggcccccgatcaccacacctagggcttatgcttttgtgccttagcccatacctggtacctataacttgagatacctgaagatatgccacttcctccagacccacagatacccttcaatatgctgccccaaatctcacccccaactgaggagtacatcctgacagtaaacattctttttcttttctttttctctctttccttctttctttctttcttttttttttttttttttttgagacagagtcttgctctttttgcccaggttggagtgcaatggcatgatctcggctcaatgcaacctccgcctcctgggttcaagtgattctcctgcctcagcctcctgagtagctgggattacaggcacgtgccaccacatctggctaattttttatttttagtagaaacaaggtttcaccatgttggccaggctggttttgaacctgacagtaaacattctaacccaagctcctgagtcctgcccttagcgcacatttgcaatgggagcaggaggcgaattagattagaccaggctgagctgggagagtaaataactctaaaatgccatggcttcaaccacattcatttctcatccctgcaaagtccactgtgaatctaggtgactctctggccatcctcctccatgtagtgactcagtgatccaggctgccctcatctggtgaccccaccatctcaacgccaggcctccgcagttgctgcagcaggagaaacactcgggtgggtccctcacagcactcttctaagcttcagctcaggccctgcccacatcgattagccaaaagtcatcccgagaccctgcccaactgggaaggggatttagaagtgtgcctttcttgagagaaactagctgtgggcagccagggtgatgtccccccacagcaggtacaggaatgcagtgtgatgctgaagggccagcctggctgttgagagggtcagcaagaatgggagactggagaagggaggggcacactcttcactcctgctcagagcccgtcactgcacaggctagggactggtgcagccacggctgtgagtttggggtttgctgcttggattttaaaactgctccaaccagctgccatgtttgttagagattgccattgcatgtatgagaaactcaagcagctcagcctcatagagtttgtttgtttgttttctagtgggccaggaaatctagggaggcagctaggggctgacatggcgactctgagatgctacccagaccccaggcttctgggctgtccagcccaccgtctctagcttgtgcttttgttctcaaggccacctcatcattacaggtgttccctggccactccacctcagacaagaagacagaaggacacagaaggacctagaagggaggaatgctacctgggtcgggaagtaaaactttctcaggtgtccccagcaggcctctgcccatgttccgttggccagggcactgggggcctgggaagcaccgtgtttaggtgagcacgtttctgccttgatgaatttgcaattctattatcaagcaagacaggagaatcgatattaggtgggtgaatgaacaaactattaaataacaggcagcttcctacaaaacattgagtttctattggctcttttgaagattgaattcttagcatacaaggcctgcatttcttaatggcaaagtctcaggggatgagtttggacttctccccttaggaggttatgcccccagcattttcttgtctgttggtgtctacttatattacactcagtccaccttacccagggctggcttcacacagtgtgacctgtgtgatatcatagtgttccacgcttggtttgcctctgtggctcctggggaaccagaaaacacatggacatgtaagcagacagggagggtcccccgggattacaggaatttaatcaacagagccatcagcctggtgcacagcttcctgccctgcagcctgcttctcttaatccctgtgagaaatgtggtcacctacttggttaaaaccagctcctgacagagctgggcaacgtataaatgaacccaagagctttcctcatgactactccaggaggagccacagtttcatcaccatgacacgcgacccatttgctggcatgaactcactgcatctgcaccaggggacaccccccctccatgcaatggcgtgccctctcccctctccatcatcccacaagaccctgctgtccctttccctcagggacacactgcttggggaatacgcccatgtcctccttacttgtgccaagtaataaaactcctgttgatcaacacctgccttctcatggagagtcatttgttacttgccaggtaaactcccgtttcatcagggaatagactcaggacctgagagacctggattcagaatcccagcttagagtcattggacaagttacttagaatcctctattggccgggcatggtggctcacacctataatcccagctctttgggaggctgaggtgggattactcatcccacctcaggaggattgcttgaagccaggagtttaagatcagcctgggcaacatagtaagaccctgtctctacaaaataaaaaataataataaaaggctgagtacattggctcacacctgtaatcccagcactttgggagactgaggtgggccgactacctgaggtcaggagctcgagaccagcctggccaacatgctgaaaccccgtgtctactgaaaatacaaaaaattagccgagcatggtgatgtgtgcctgtaatcccaggtactcaggaggctgaagcaggagaatcacttgaacccaggaggcggaggccgcagtgagccaagactgcaccactgcactccagcctgggtgacagagtaagactccatctcaaaaacaacaacaacgatgataataattaatacagaatcctctaatctcagttttctcatctgtttaaagaaataaaaccacttcttcctcagggggctatggtgatcctagacagaaagggcccagcccagctatgtgtacctggagtttccacgacagtcctgtccattattaatgcaatttccatttctgttgtaaagactgcttccaccacacctgcctaatgacaaagcctcaccttcaaagctggggcataaggatgtctgtggctgctagatctggagtaggggctctcagccccctactctcatttgaacaaggcagcaaccatgctcacgggatgccaaggagagagacaagtgaggctggtggcagctggccgagagggtccccgtcctacctggccaggccaagaaagctgttgatgcatcccaagacctagcaagacttactttctcagtcaccttgaaaggaaggacaagcctccaagtcggctccttgggagtggagagaagaagtttcctccactccactgctgagagttacaaaaggagccattagcacttgccaagcaaggccaccttccatctgagggagaaagtgcaaaagacagtttaaaagcctcattaacacaaggcaacaagtcacaggtgaaaattgagcctctgaggccctgctgattgcacgggggggaaggcatttgcatctcttctcaccacagaggggtggcagccaattacctccaggattagaaaaaagttgcaaacctgagtctatcttcactgacgggcttgaattccctgccatgtgcccctcgctaaagcctccgctttgtgtatgagaaaaaaagcctctaagacctgtgggaaaacataaaatctggaagcaagttcacccgtggctgaccagaagcagaaatgttgcttcctttgtgcaagcccttcctggctgggccagaacatcagctaatgcagcctggcacgtggtctggcaggataggccctgccaattagaaattcaaacacaatcagtgtaatgcctatgcttttgctccctacaggccgtgcaggaaacagaagccctgcgtgtctgtgtcccctaaataaatgactctggttcattcactgcctcctacccactcccttgccagctgttatgtgtgggttgtggagaaaccccgcagtgccctgcaggggcttcttcctgcccttggggtctatgggaatgctggttgcctacatagtgcacactcaaatgtcttcagcgcccaaggctgtcactttctcagctccctgcctactcaggtctacgaagtcaactgcaaggttgtggtccattctttccacaccaaccctggccacgggaccttagccctttcagaactcagggtgctgaaatgtctgagaagtttccccaaggaacgtcaccgagctgtcccctccccaacaacctagggcagcacaggtctccatccattgcccctgaagcccccaatgtctctttctccctcccaccctcagggaggctcactgacccccgcttaattatgccgtgtcctccgttgaagacctcctcaatggggaagtgagtactggcaggggaagaccacagtggggaattttaggtgtgaagtgttctatgaatacatcttcatctgggcggcggccacacagacacaggtgggcataaacatgaggtacaatggctggacactcagtattcatgcacagacatgtgttactgtgtgtgtgtgatacttcagttttaaaattatgacaccccaccccaaaaaaattaattatcttagaccaagcatggcaaacagccaacatacagtccctcagagtggcaatttcctaagttcaaccaagtatttttggccgggtctgaactatgtgtgcttttaacaaaaatttgtttccaacctttaaaatggaagattttacataaaaattttgaatttctggctcccactaaaagcctaaggggcacttgatctccagttgtagccatttggatttgcaagctctttttcagtcattaaaatacaaaatacaaagaccccaaccagctgctggaaaggtattggggctactttccaggactgcactggacaggggtgggatggggaggagctgggcatagggaatgctgttgtaaatgcagttatttttttaacctttttttctgctatatcaagcaaaaacattaaagtaaaaaatacatataatgtgtatacatatatatacatgcatacgtacctatctatctatacatacatattttcccctttctttcacttaaatcttcactcactagttcctgtttgattatttttttctccctctcatccattgctattaatttctggcagcaatttataaatgccccactactctaagaaccattgaaatcacagttggaaacctcgataatttcaccaaggcagaagcaattaaatgcaaacattggcaaaaatttttaacgctgcagaaaatcacgaaaatgccaaggtaagctcattgctgctgcagatttaattcctactctccttaaaagccagaaatcacctctctccccagcaggacctgaacaagccttaaactagggccatgtgaggccacatgaggatgattcttccccctcccaaacccagcgtggcagagaagcaggcagccccgagggcatgagagatggaagcgtccccctgatttttctcatcccattcaagttcaggactgaaatggacagaacaatagttaaccccacagcctgcagcctctaccactgataaccaggaaaacacagctaccttatacacttctgctctgcgcttttcaaggtcattttctcactagggcactcactgaaagtctagaagttagaaaaatgggaaggttgagggacccctttttcatacacatagaaagacagagctcaagtttaatcagcaatttgccattcaaagtaggataagagccagggtctccaggcttctaatctaaccccactgcttctttcttctagacctacgactcgttccagcaccgtgggggctgacacccatctcactgctggataaaagagaatgagatcctctctccatcctacgttggatttgcttgctcacacaaactgacccttagggacagaattgttcaactacaattagatttagttaactaatcctggaagcgaagcttagcatatcagacagggttctggcaggagactcactgccctcagaaagttcaccctcacaggctgcaacgcagtgactgtctacagcgatggggatgtggcaggggctaaggaagccaacaagagattgtcaccttcttagaggagaaagccaagatggggagatattaacccctatgcgtgaaaacatgaggggaggaaggaatgtttagcccagtgagactcagaggcacgagtcagcacctattacagacgtggtgcagaaacatggaggacatggagaagaaatatcctgaccttgttccactttcaccctccaattccctgacagtggttcccattgactgagcccagctcgcagtcacaggcagggagcaggggtcaatctcctggtgcacaggcaggctgaggagggaatgaatgtaggaaagggctggggagagaaaataagtagcatgccttacttaagagcctcaggatctttatctgtaaaattggatgataacatctacttaatagtgcagttccgagaataaaaactaagatatctaaggcatgcagcactaaaaagtattgaaaattgtaaacttactctcctcatcatcatgagctatgcttcccttaaacaatgctgttctgttcccaatatgaggtatcccgcagattagaatggctgcataattgcttatcctccaggcctcattccccacaaaaggacggcatactttctggagtatagcattcctgaaaagggcccctctagaccatgtttgattagtttcagtgatggtggactaactgcatccccatctcttctgccaccaaatcactcaaaactcagaaaactatttctgtattatcaggacaaagcactccctatgcatattctccaaggcttctgcactcggaggtcaccaggaagagatctgctctgctctctcattcactggagccctacagatctgggaaagctttgggtttttttttgttttgttttgttttgttttgtttgtttgttcgagagggagtctcgctctgttgcccaggctggagtgcaatggtgcaatcttgggtgactgcaacctccgcctcccaggttcaagcgattttcctgcctcagcctcccatgtagctgggattacaggcacccaccaccacgcccaactaatttttgtatttttggtaaagacggggtttcaccatgttggccaggctggtcgcgaactccggacctcagctgatctgcctgtcttggcctcccaaagtgttgggattacaagtgtgagccaccaggcccatccagaaagttcttaagttagatctattcttcacaaaagagaggaaagattggggttgggggtgggaacccagctctttatgccaattaattaacgcacattgaatggacagatttctttttctttttctttctttcttttttttttttgagatagagtcttgctctgtcacctgggctggagtgcagtggtgcaatcccggctcactgctgcctccacctcccgggttcaagcgattgtcctgcctcagcctcccaagtagctgtgattacaggcacctgccaccatgcccagctaatttttgaattttttagtagagatggggtttcaccatgttggtcaggctggacagatttctaaaagacacaactaccaaactactaccactactaaagcccattttagcaagaaatagataacctgagattaaatccatagttaaaaacctttctacaagagaaatactgcaggccctgatagctccactgcttcaatggtgaattctacctaatttttgagaagaaaagtgtatcaattctacaaaattatttcagaagatagaagtgaaaggaatactttctaactaattttatgcggccagaatttccctgatactagaagtagaaaagaatatgtcaggaaaataaaactacagattaatatctctcataagcatgtatacgaatatcattagcatgattttagaaactgaatctagcaatatattttaaaagacaataaaatatgactgtgatttgtgatatagtaagaatatatacgtatgtatatacttggtatattagacacagcaaaagacagcattgttaaattaaggcaaaaatacaaaaataataatcgaaacagaggcacagagaaaaataattgaagggaaataaaagccaaataaagcatctgtaactagccacaaatagcaaatgatataaaatacttgcaagtagaattccagaaggaaataaaagatagaatggggaagaaagggtgtttgaagaactaatggctaaatttttgcaaatctagccacttacctcaaccaagagatgcaagcagctcagcaaaacccaagaaaagtaaaagggaagagaatcacacctaggctcatcatttttaaactccttacaaccaaatatattcacacaaaagtagtcacattagatatatggggaaaatgataaaaatggtggctcacttatcagaaataatggaagtcagaagatgtctttaaattctgaaggaaaaaataaactctttcaaccaaaaattctatgctcagcaaaaatgtccttcaaaaataaacaaaatatgtaattacagttgcataacagctgagaaaatcccttgccaataaacctgaactgtaagaaatgtaaaggaaattcttcaggctgaagggaaatgatacccgatggaaactgttctacaggaaggaatgactgtgccagagaaggtgaggaagtgcaccttgctgtgaggagaaatctgtgctgtgctctgtgtgtgcatcatggcttagcaggacagggcagccacaggcctccctgcagtggacttgggacttcttcaaggcctgaggactggctctcagctgggtgctgggatcttcctggagaagctcttcaaggtgtaatggcctcccccaaaagcagagtccaggttctgacaactctgggtttctttgggagatgaaggcatgcgcagaaaatgttgtcaccattacctagttttgaagaactttatgctctttttttcaaaaaaaaaaaaaaaacagctataaagaataataatacataatttgctttcaacttaccaaattaatttaaagtgacgtgatggcctagcaccatcctcaagagataccaacctttacacagagccatcataaatagcaaatatagaggctgttagtaaaaaaaactcaatgaggccaactctatggctcaccgtgaaataaatttcacagaaatagaactttaaaaatagaaaactaaacaagcaaaactggatgaactgattgctgatattcaagaagccaaagtcattggaccctaaatcataatccatcaaacatcgatggtttttccaaatagatcatgtcacagagtctttcccacatggtccttcaccagaggataccatttgtcttcaagaaaatacttttacacctctctactcatattctcacttttgctcccagactttgtcccccaaactcttcctataattctacatttattttgctggagaatttcatggccaaggtctctatgattttctgcacttccagaaagcattcatggacaccccccacccccacttgacaaaggcatttttctggcctgccacatctttcattgataacaaggacaacatcctccaagaatttatcaccattttcttttcccatgtgctagactttgcccctctcccctgccatcataagaataatactgcattatcttcagggttgaatttcagtgttcaaatgacctactagtgaacatctagaaaagtagaaaaaacaattgacttaaaaaaatattttgaattatctctcattttaattcaagaaactactattacttaagtgattatacttttgcccagaggaagctttatagaattattattcttagcataaaggtttgtaagtaaaattatttagaatattttttgagagcatgctcttatttcagatgccaggttcagcatgcagagcttggaattcatcaccccatcctaacaagcaaaaagctgaacccacggaaaaatccctcttctcagatctttcggaaaagtgaggtcacagggcaaacactgctctcaaaattggagagacagacaggtgaatacagcaactcacaacttatcagagcagaaacccatcagcaaacacctctgagggaccccaagccaggttaggaaaacctcaaatgtcattgacaaattgctggaggctccacatggacaagttaaaaactccagaaggacctggtcatggaggggttgcacgggacacgcttctgtgagttttaccttcaggagctcaaccaggttctcacagtgaatatcagagaaaaatctcctagggcttctggcaggggaaaggaaaaggaaccattttgaaatctttctgagtattctgttattaataaggcctcacaagaaactatttcatcagagcctaaaccattggagttttatcagagccaacctgggaaaaggaacatgcccaattccagcccaccttagcttttcacacgagagaaaggaaatacccagctttagccacctctagccttcaacatggaaacagggaatacccgatgccagtccactctgcccacgctgtctcacctgatgggcaggtacaaaactgagaagcactggtgaagttcacagtccaggggcacgagctcactaaaagactgagagctaattctaggactatagaaggcacccccatatcttatcaccacattactaaaggcctggtaacctcagtgtctggctattacatgcacatgaaaaatttataaagcaaactaaaaggcaaaaaaacaattgaaagagacagcaaacatcgtaagaagactcagatgtagcagagatgctggggtactatcagaccaggaatttaaaacgattattactaacgcactgagggctctatctaatggatgaagtagacagcacacaagaacagaagggtgatgtaagcagagaggtggaaactctaagaaaacatttttttaatgccagagatcgataacacagttacagaaatgaagaatgtctttgctgggctcattagtagactggacacagctgaggaaagaatctttgagcttgaggatatgtcagtagaaattttcaaaatgaaaaagcaagggaaaagaaatctacccaaaacagaacggaatatccaagaaccatggggcagctaagaaaggtgtaacctacatgtaatgggaataccagaagaagaaagagtgaaagaagtgtttgaagcaatatttgctgagaatttcccccaaattaatgttacaaaaaacaaaactacacatccagggagctcagagaacacccagcagggtaaattaaaaaaaaataaaaaaaaaatatatataagcacatcatagtccaactgcaaaaaatcaaagatgcagaaaaatattaaaagaagccggggtgagtggggaacaccttagctacagaggagcgaagataacagttacatcagacttcccagaagccaatctgaagagaccatataccgtatgatcccagctctatgacattctgggcaaggcaagttatgcagacagtaaaacgatcagtggttactaaggattacagggaagcacatgcagggcacaggggattttagggcagcaaaactactctgtgtgactctacagtagtggatccatgtcattacgcatttgttcaaacccacagaatgcacaacaccaagagggccccctcatttagtttatggacctgggtgacagcaaacggtccatgtagtttcagcaattatgacatatgtcccattctggtgcaggatgttgatagttggggaggctgtgcctctgtcagggcgtaagtatatgagaaacctctgtactctctgctcaatgttgctgtgaacctaaaactgccctaaaaattaaaatctattcaaaaatacatgttctaggccagatgcagtggctcacgcctgtaatcccagcactttgggaggccaaggtgagcggatcacttgaggtcaggagtttgagaccagcctggccaacatggttaaaccccgtctctactaaaaatacaaaaattagctgggcgtggtggtgtgtgcctgtagtcccagctactcgggaggctgagggaaaagaattgcttgaacctaggaggcggaggttgcagtgagccgagattgggccactgcactccagtctggcaacagagggagactccatctcaaacaaaacaaaacaaaacaaaaacatgttctaaagaccacaatgaaataccataccactacaattccactagaatgaccaaaatgaaatcaatgttagagagtctgtggaataattacatactcctataccgctgttgagtgtttagtacaatacttagaaaactgttcagtaatttcttaagatgctaagcatacatctaccctatgacccagcaaatatacttccatgtatttatccaagagaaatgaaaatatgtgctcacacaaagccttttataagaatgttcacagcagcttgattcacaataatccaatgtttgaaaactttccaaagtccaccaacaagtgcataaactgtgataaattcacacaatggaaatcacttcagccatgacaaggaatgaactacttatcatacaacatgaattctcaaagtgcactcagcgaatgaagccagacacaaaaaagtgtatgcaatgtgattccatttatatgaagttacagtgtacgccaaatggtggagggatagattgggaaggtgtggaaggacatattctgggatatatgtaaatgtcctgtcttgctatgcatgtgccaaaattgagtagacggtacacttgacttgtgtgtaaattaggcctcaatttcaaagggcatgttctctggtaattacctctttccactagagtccagggcacaaggaatatgaaagcagggttttgatgcaaacagacaggctttagggcaataatcttaagaatactgagctcacaacacagctcaacactcagagcaaagggagggtagcctgtgtcctgcctgtgtagccacctcttctcctgctatacctgactcttcccagaccccaccagagctgtagcaaagaccagggagtggccaggcatggtgggtcacgcctataatcccagcaggagtaaagcttgagtctaggagtttaagaccagcctagacaacacagcaagaccccatctctaaaaatcatttttttaattagctgggtgtggtggcgtgcacctatagtcccagctacttgggaggctgaggcaggaggattgcttgagcctaggattttggaggctgcagtgagctatgatggcaccactgtactgtactccagcctgggtgacagagtgagactctgtctcaaaaaagaaataaattaaaaaaaaaaagaactgttgaaggcaaagtttttccacaatattttgccattgtagacagtgaagcatgcttctccagtcttactctgaggctctgagttcatcagaatgattgaaagttctgctttcaaaatcaatgggaaaagtgtcatctttgatgacataagacaatgatgtagagggaatatggaattatccatcttctcactgctgggggaagccgcatgcaccacagaagtggcatgaggctttcatgatagctgctcacctcctaaagctcatccaagtgacatgctgcttgacagcctgttgcatattcaagccagaggttgcaaccaatgggggtttgctgatatgaatggcttggcttgctgagttgccaacactgaaaaattagagttttatgtgaaagtctgggtttccatcttctctagaaaaatcagagcaaatcagataaatgtggaatcattatgaatatgaataacactgctccagaatcccatgatggtgagacccaccagcattctgtgggggctggtctcctggacagggctgtgccacctccacttgcccgcggtgatcacttggcccatttccccccccttgtgaattgttgaactcaaagtttaaggtttcccttaattatagtcatttgaccttcctcacttccaagagctcaggagaaactttcccatcggcgataaagcaacattttatataaattgcaaaaattaaaccacagagccaattactgcctgagctgctcacacagtgtttcaggggacgttgaagaaagggttctgaccttgagaaatcttctcagctctggttctcaattttctgacctataagataagaaaatgaactcaaccatctccagtggctcattcctctatgataaaatatctaaccctaattgtcttggcaaagacagccccttggcatcagggaggctgttgtacaaggtctgacccacttctcattcaatttattcagaaaagcatgtgttcgtaaaaccttccttcatggccaagctggcgtgtaaacggctgctcatcgcagccagcacttaagaatactgagctcttgatatggttcaaaatgaagagagacaggcagcctgtgctctgcctgagtatctcctcctggggcaccacagtctgtccccagccccaccaaggcagcaatggggacccttgacatcaagggtagatttaaacatcaaagtcccgttgaacccaggcatgaaatttccccagatgtgttcacattcaggttacaaatgaagtggaaaaggcttaagacacatgcaaaaacctcttgacaaaaacatcagggaaatatttgtggatgaattcgaggaggtttcagaaggtcgattcttccctcaaatacgataatctagcaataatctcaccaagcaatctgcatgcttgaagatggtcacatttgttgttaagtttatgtcaatttaaggtcaaatatatgtgactgtaaatatatgaccttatgtaaggaaagtatctacacacatacgtaataaatatgcaactaacatttaattaactgattctgtgcactaagtaatttccaaaggtatactatactatcatctttgatttttttttcttttcttttctttttttttgagacggttttactcttgtcatccaggctggagtgcaatggcacaatctcggcctactgcaacctctgcctcctgggttcaagcgattctcctgcatcagactcctgagtagccgggattaaaggtgcccaccaccatgcccagctaatttttgtatttttagtagagacggggtttcaccatgttggccaggctagtctcgaactcctgacctcaggtgatctgcccacctcggcctcctaaaatcctgggattacaggcatgagccaccgtgcctggcccacctttgattctttaaagttccactttacacatcaggaaaactgaggctcgggaaggtgaaacaacccgtccaagaccacacagctaggatgggcagaaacctagcagtgctggacttttcactcggctagctgggcaccaatgctttgagtctaatgcttatgctttgggttatgacatcatccttcctctcatgctgcatggaaattaagagttccctgaaccttgttaaatcaacagataacctttctgtccacacggtgaggatggcagcattcacaacctccttttatttgaccagaggtgttcagacacatgcatgtccttgataagagtcagatacaattagagagagtgcgaaggaactggaaggagctgtggattgagagcactgtgtaatctcgacctcccgtgccttcggggctaatatgtcaaggtttccacggaccccctggacacttaaggacttgtgtgcatgcatggagtactcttcctctgtcttttggaaagccatggataaaataatgacaagagacaatgctggccacctactgtgcatgaggttgtgctctctcagccaccctacaaggctggaacttgcccctacttgacctgggctgcaaatgagaaatttacagccaggagctctcagggtctgagggagagccccgatcccagggcaggacccagaggtctgatttgtctgctctgacctgataggttctcctcactctctgaaagaaagcctgcgagagcaaactggcctttgcaccccatctgtctggaatgccctctttcccaggagcctcacctctccctgcctgtacaactcctaaggctccagggaccagctctaacttcctctccttggtgctgcagcctctgctgctctagcagagggaggagggtccttgctctgagcccctgctactcctttgaggtgccttaggcccagcaacaatgggctgtccattgctggctggtttatccccatgtgtgacagtccatttgcattgctgtaaaggaacacctgcgattgggtgatatataaagaaacgaggtttatttagctcacagttctgcagccgtgcaagcagcatggtgctggcatctgctcctggtgaggcctcaggaaacttacaatcacggtggaaggaggagagggagcaggcgagtgtcacatggagagaaaggaagcaagagagagaacctttagacaaccagctcttgtgtgaactcattacctcagagagcacaccaagccattcatgagggatccgcccccatgacccaatcagctcccaccaggccccacctccaacactgggaatcacatttcaacagagatttggaggggacacacacccaaaccatctaagcgctggaggctggagctccgtggcaagcttgtgcctggactgcagcgctaaccactagcaccgacaggcctgtcctcagcttctctctggcagcagctggcctgtggcctcctctgcctctccctgcaaccagctaatgaccccttccctctagaggcttcagggtccttcaatctgtgcccttctcccccaaagcccctcgcctgagctcacagcaggctgtcacatatgctggccttgttcaggccctagaaatggcttttggatcagtgtttctttcctgcaccttcttcaagagagctgaggctcagcagggcccaggcctggccacagggattgtcaatgattcttcagaggctattgacaaggccccacctggcaagctggcatccgaggacccaggcaggacctgagccctgctgcctcagcagccagcttcctgtaggcccctgaacacactttccaaactgaggactgattctcatcatggccatactcctgtctcccagctcctgctcccacagagcttcctgctctagaaccaagctttcttagagtctccccgccctgcctcgacccaggctggcctttgcagtggaggcagccccacccagagccagagcttcaccacctctgccaactgcaagcagcccccgccttgtgctggcaggtatggcgaaaatgggagagactgagttccagttgggaggagagagagacaggagatgaggagaacatgagctcagtaattcagcttgagtacctaacacagacatggggtgagggggctccgtaggaccatgggagcgttctgcactgacctgcataggatagggcttgaataaagttttactcgaatcacttttcccaccattgaacatggactgtatattcagctctgcaatttgcacttccatttagtatttttaaaaaaggtttccatgtcaatccacactgacccataatagagctgcttcgagcatcatcagattgggagctgcagaggggcgggggacggagctgcccctcgtgctccttcctcctttcccccaccacacactcagacacatacacagagagacatacacagacacgcacacacacacaaacacagacatgcacagagacacacacaggcacacacacacacagacacataaacacagacacacacagacacacacacagagacacacataaacacacagacacacacacaaacatacacatacacacacatacacagaggcataaaaagatacacacaaagagaaacacacacagatacacacagagagacatagacatacacagaaacacacagacaagtacagacacacacagaaagatactcacatagacacacagagggacatacacacaaagacatacagacacacacacaaagacacacacatgggcacacatacagtgcagagtttctttacagccagagttcagccagagcttgcagaaaagggggagacactgatgaccttagcggtgccaccctgtcagagtatacagggtcatgtttctctgcagtggggttgtcagtaacagctaggccctgtccctttcctggagaagcaggtgtgaaaagtcagagttaccgtgtacagccagctctgctgaggcactcaagccggcacctccacctgacccggcacagccctgtgccccagtgccggtaccatcacctgcccacaccacccttgggctgcctctccctgtgccgaagctgagtaatctatactcagaactttcctggagatgggtttacagtcacaggcatgcacaggtcgtcttttccaagtagctgtgtgtgtgtgctcctgaagacctgtgcactctcagcgacccattaggccaagagtaccaagccatgcacagcctgccaggagccgacttggtgcaaggagggagaggtggctgtttgcgtgtgagctgttagggttgggcgctgccagaaacttagaaggtcatgaagtttcatgttggagaaaccagagatcagaccttgttctactgtgtgactatggctcagctggtcaacctctctaagcctcagtttcctcatcttttacagatggggctaacaagagttgtcccataacaaatgattggcattaaggaatacagtcagtgtaaaacacgcagctttctcgtagcatcactaaatactattcatcgtgttttggtcatggagagccaccatggagctataagattttatacagagatgtggagtgtgtatgagggtacatggcaggcacatcaccctggagtgagatgtctgtgggattttgtcttgacagatgcctccatgggcattccgaagtcagaagagtaagcttcttcccagaaatggaagctgtcatttccacccaggtttcagtagcatgtgcgtcactggctgcgcctcctcatcccattttccaaggtttgaatcctactgggtggcccagcaggggccccctacagggctcagggctataaggctcttgaaattaagacgtggaggaaagggggtgttaacgaagagcgtatttcatcccagcatgtatggctggttctgaaagttcctctgaccccacccttcaaccagtggctgcgttgcgggtaccactaagctgatagtaagtatgacaggaagatacaccatcttttgtttcatattttattttctcaatactgctataaaaagataattgtcacaaaaaaaatccttcattcctttttccaggggccctctttatttgttgattttcaaattattcctttgttaagggccttttctgtatcctccttgttaattttctcttccattgttactttaatgcaccggatccttggttatcagcgggtgtgcataggatgcaaacagttctctctcatcactttcattaacttcatgaaattcttctctaagatctgtaattttactttaagcagtttgcattttgtagtcagaggtttacagcagccaacaaggagcaggaagtggagtggagaaaaacgttagtatgacaaagttggagacagacagaccagcagtaacacaggagggatgtttcagaggagactagttttataaggcccagaatatcactctattctagcttctcaaaagattaattatcagataataatgacctgtccccctacaccagatgagacttgctcctaacagaacatttaaagtttcaggtaaattatctttccaagtgctgtctttgtattagttcctggagttgatgaaggtggtcagaccagagacatttatgaagtacttacataattcttggcatgctttcaatgtttaagacttgtcatagtccccatgtattgatctaaactcaggaatgcaaaagctattctcaagggagcctggtaagagattgtgtctgctgcacaggtccagccccagcccctaaattaatcccgctcaattcaaagcctcctttcttccaagttagaagtgacaggccaggtcctctctcatacaagcagctctcaggagggctccagctgagaaacttgctgtctcatttgtttctcgaacacacgccccatggaatgcatgtgtcatttctgtagcataaggaatgtgcccgcacttcatgcctcctgtctgttcgttagttcgtaattaagtatgcacagctacagatgtgtcgcggaaagacatcatccgagtcttgacaaagaaccaaaattattcatataatttatcatcccagccatcttgaatgctaacgagaaccgtccttgattggaattgtcaagaaacatttgcacccatgtcctatcagggagcatttcctccgccagatgctgcctttcataccaacgacaaagactctctcgtgctttctccctggcctttacagaaaccaaatgcaataaaacaagcagttctcccttcccccttttctctgatgcacagttttccaaagggcttgcagttttcaggttttctggtgaggggcattgcaattgttagcttgttctttaaagcctgttgtgagagcagtaacacagatctgtctaacacatgttcctagcatcagagtccagggataggtacttagatgcaagattcttttctgctcttagatgcaagattctcttctgcccagaaggaaattcaggagtgtggaaaccactggctgtttgacccaggtccacccaaaagtgacccagttttggagaactggcttgctttggggttttgctcagatatgaggacacactcccaaatgtcatttttagaggtggtggcacatttaggagactgaagagtcagtgttctgttaccgggatgaaaaggaagaagcaatgcatttggaacatattggaaggaagagatatagctccctgggaagagccttcaatttccaagccctctttgcatccttagggacagtatcagtgcttctttgggaaaaaggagagatctgtctacttattgttttgtgcactccccaagcctgctgtatgtccatctgcaacactaacttttaattcatcaagataagtaggttttgaatgtagcattttgtcctcatattcagtgttcataagttaatctgcaaattgttgttttgattggaaaatgcattaagcacaaacccatctgattatccctgggctagaggcttggtcagacccccaggaagagggctggggtcagagaggtctgacaatgaaatctgttgcagagagctctggtgggctccagttctcagcaccagagttgtgcaaggcttggggtggtctggaaaagcttcagaaaggttaccttgtgaagtgttctaggaactctgaaagagactggatagaactgaatgttcacacaggaagtggttatctccctgtaagtgtgtattattataattggccaactttttcacttcgttacccagcaggagaaacagcatacaccaacttcactagacttttgctttcaaagactccctactcacataacccgtcaatccacctggctgtttcagaggtaacttcattgtagagatggagagcctgagactggaaggtaagaccaagatgcacaattctctctcaatttcttctttatctttcccactttcctactttcctacatcagcaggcagtggcatcacagccttatcctccctcagaacctaaatcagacttatcagatgattctgagggttcagttaaccctgaaatttccagacagaccactgctcccccatagagtatctggggtcatgggtagctctgcttttaagcattctatccctcattcactgaggtccagatattaaatcagcactcaagatagtagagagaacaggatcccaccatacccacagcaattttaagggtggcatggaaatctgcctcatggaggtctgaagtgcaaagtacatgtatgtgggagaggcagatggagacaggaatgatatgttttattaagataggaaaatgtggataaataagtgagctcactcataatcctttcccaaaggaaagtcataaggctagacaaattcatgcatgtttggtataaagcaaaaattagaaactttcttatcaaaagacaccataaaacacaaaggtaggaatatgaagccaccaactgggaaaaaatgtttgcatatatataattggcagaggattagtatataatacaaataaagaacccttaaacaggtggggcgtggtggctcacgcctgtaatcccagcactttgggaggccaaggtgagtggataatgaggtccagagatgagaccatcctggccaatgtggtgaaaccctgtctctactaaaaatacaaaaattagctgggcatggtggtgcgtgcctgcaatcccagctactggggaggcagaagaagtgcttcaaccaggtagtccaaggttgcagtgagccaagatcgcaccactgcactccagcctggtgacagagcaagactctgtctcggggaaaaaaaaaaaaaagtacccttaaacaaatgagaaaatgtcgtgggaaaatggcatgagcagtcaatttcatagaagataaaacatgaatggcccagaaacatgtaaaaagtgcttaaccaggtgggaagttaagaaaatacaataaaagacaattttactcctaccagacagggaaaactgtgaagtctgacaacttcaagtgtaggtaaggaagaagagcaacagaaattctcatgcactgatgatgggatagcatattgatacaacctccttgaaaaatcatttgttattacctagtaagttaaatatgcacctactgtctaaccaagcaattccactctttaagtatatactgtaggagtcgttcttaatgcaggcattaccacaccctagagggagtcttggaagcctgcaaatgtcacaatgagtaaagagtgctactggcatttagtaagtagagcaaggaatgctaaacatcatatggtttctggggcatttccgcctaaagatgaattagcctgcattgcacatgactacatgtgggaccacataatttatgcaagtgaatgtctgttgatacttacctgatcctgcaatctaactctaactttattttacatataaacagttaaaaaaaaaactcaaatgcattgttttcctgtctttaacatattgaatttttcaggaaggcaaccacttttctgaaaaatattccttttattgaagggatattgtgctttctgttgttattgttgtttagaactttaccaagaattgattaacattatagaaaatcatttctctgctgggaatctcgtacgtggtatttgggctatcaacccaaaacacctatgactgtttgcatttgtagctggaacaatcatggtaattctacccacaggtgcaaacatctgacattgttattctagcttctgatgtaattgttcctcaaattttacatactggtccaaccaccttttattataaattgctttgtcttatttcttttttatatcacattcagagcattacattgatttcttaaaattctgtgggtaagtgggttatagtacatgatctatagtatagatagatagcattctatctatactatagataaaatctataccatagatagcacttacccatagaatttcaagaattttatttcaagatagtaaaaagaacatcacaaaatacttgtcagaagggtggtgctggtgttgagaataataattcttttggggtatatgtaccccaaagccatgtacaaaagggttaacagcagcatgactaataaaagcaaaaaaaggcaaaaaaaaaaaaagaaaaaaaagaaaacccaaaactctgaaaacaaccaaagtaaccattaacagcaaactggataaatgcatgttatgaaatactatatagcagtgaaataaattaacagttatattcattatgatgggtaaatttctgaaagcataatatggagcaaaaacagcatattgcaaaacacatatatagagtggaaacatttaaatttcagtttcagaaatgggcatgactaaatatcctatttaggaacacacgcagtttgtgaaagctatgcagaaaattgaagaacagtgaacacaaactccagggtaatggttacctggaaggggagggatgagtctgggaggggcacatgggatgatgttttctttcttaaactggatagtaggttcacgactgctcattttattattttaaactataaaaatattacataccttttaagacagaacatatttcacaatttaaaaacttttaaaaatcagaacctcccaatctatccaagcctttagttgactggactttttaaaaatcccatcttagcttgttccaaggattggcagaaagacaaatgaaactgccaggtctcttctgggtttagtacgtactctttgtagcactatgtcctggcacctgtctggggacgtctggccaggggacactgttgatgccggaatgaatcatcatgttgatgttggaatgggtctcagcatccctgcagcctcccaaaggggctatccagcctctggacaccatgggggctagcatctgggagaattcttgcagcagaatcagaggaagggttgccgttgccatgagaatgcagtcgcatctcaggggagttctgactgagttccttggccctgagtgatccattctctacctctaatgggtcacctgtcctcctccattgcttctaatgtcaactgcacaggtgcccaggcttacagaggctccaccaacccctaaggctgcggggtggagaccaggtttggcaaggcagatatcattttatttgagggattttgactaaacgggaagagggagaagctgcatattcagaatgaaaatgagagctgataacagtgccttcagcgggctagccacttgctgggttctagaacaccgcagggatgacaattctcaacctgaagaactcaggctcccccgggatcaaatccccatgcactgcaagcttctcgccagcaggggctgtgtctccatgccctggtccctggcgctgagcttggccaattctaggtggttgcagtcttgaaggaggcacattgaagaagtagctgaaagaggaaggcagagcagatctaataaatgacaaatcggtggttcagacactgcgagcaaaacaaagacctcacgttgggttagagaggcctgaaagggtctcctgtagaagcagaactagaaagaaaggtgggtatgagacgggtgcagaaggaggggctggggtcggggacatcggggtgtggaaatagagaagaaagactaggaggtgggcagacacggggagctgccaggcatgaggggcaggcagctcttgcagtcgatgggtgacatgttggctactgccacatcttgggggccttagatgctgcactgagggtccccggtgtagttttgcaggcaacaaggagttgtaaacgatgtttttgtgtcccgtccctggcccagctcagacttcagctgcaactctcctgccagggtcagctcccacctcaagcaccttctgaatttctgtacttttcctccctgggcccttccccatctctgtggagctccctctgctgcttccagcaaaacccagaagtgcagcagagtttttggcctgggtgggaacacatgcccaggccccatgctgcagagtgggcatgtcctaggcacggaggagcaggttttcagaggcagctcacagaactgagccccagtggccgcaggggtgctggctccagaaggcacgctggtgggacattctcccctttccagtaggctgcctgctccctcactctgccccacctctcaggtcctggcctctggcctaggtttcagggaaacccgcaagggaggaggggccttggacatccaggggagggaggctcctggagatgtagccaacagagatgaaactgtgaggagagaaggacagtcagaggccgccaagggctgtgatgcgggcagggcaggaggcagttgaggttagagacagacacagccagacagagacagggagacagagagagacagagacaagatagagaaacagagagagactgccagagacagggccagacagtgagaagacagagacagacagagagagggacagatggacagagagaggcagagacagggaaagatagatccaaagtgacagaaacagaggaagacagagactgggacagacaaatagaagacagagagacagagagtaacagacggccagagagagacagagacagagagagtgacagagggccagagagaggcagacacaaggaaagatagaccaaaagagattgaaacagagaaacagagactgggacagacaatgagaagacgagagacagagacacagagagaaagaaagagatggagagacagagacagagagtgacagacagacagagagtgacagagagacagccagaagagagacagagaaacagacagaaagaggcagagacgagaaagagaaacatggagagacagagaaacagagagcaacagagacaaagagacagacagagacagggacagacagtgaggagacagggagagacaagcacacagagagaggtgccaagcaggctggagctctggagcttccagaggcctgggcaggttcagctctggagagacactgcagcttccctggcgaggcagggctgtgggcactgggctgtccattgtagggtggcagtgctggttctgcctgtggggtggctccagcctggctcctgggatggtggcagccccaggggactgcctcattctgccacctgcccattccctggctctccttcacctttgtccctcaccggcagcagaagcacagatggctgttccgtcatccagcacgtgctgcggtgcatgtcacagggcaaggtgctgagcagctgtctggtccccaacacctggtgacaccttcacaagcacataaatcacactcatcttgaccaacacaaacacattcacatgggacagatactaatgttaatgtttaacctggaaagagccatacccagcgcaatcggtggtgctcaggtcctggaatgaggcagccacggggaaccctggtgcacagggacctaaatggaatcactagtgagtggtgaccacggtccaccccgtctctcactcccctgatttcacaccctaggcaaggcactgagcctgggtttcctcttctgtggactgggaacagcccagaaaattgctgtgggcctctagaggggtcatgcatgggacacagtgagcctgggcctgccgcacagacatgccccgtggaaggtggcttttctggcggctcaggctcaaccatacccctgctgccttggcaggctttctcagttctgcgtagctgtccaacactccgaccactgtatgcggctcagtctccacttctgtgagatgctctgtgacctggtaggaccggccacccctccgagccccacacgctgccctgtaccgaagctttgttgcatacaattgcaaatctgtaaatgtcactgtgtccagtgggccttcattgactggccctgtgtgatattttattttgccctggttcattttcttcagaacctttattacgacttgcaatgagctactttttttttttctccatctctggtactagatgctgactccagggtggtggccgggaggttctttgttttagttccagatctccagaaacagacctgagacaaaaatctgggtgcacccaagacagaaatcttgggtgggaggtgatcccaggaggcctgtgagggagcaggaaaccaggtgggaggagagagaccagggtcccaccgtgggtaccaggactcatctgctcaggagagaggctgtgtgagacacacctccaaggtgtcctactccagaggtgaggaagccagtatttatttaccaggccccggattatctcagcatctggacatctgtgccaggtgggcacctgcccctcccctgaggggatgccttcccacccctcctcactccggcctccacggatcttctcacttctcttggggtgacgatactattgtgtctgccttccagtctcttttggtctctgggcacacagctcaggagtggctcctgaggacaggccccgcacccggggaggggaggcagatgccgcactcaaagacctgtccccaagaagtgctccatgaacaggatttggggaaaaaaataaactccagggtgacaagagctagaagaaggattgaggactattccatggggtcacctagatctgggggtgggagaagcaaggaaggcgtctccaaggaggggcaagggcctgggtgtgaaatcacacaggatctgtccccacatgaaggagaaggagacagggagatgcggctggaggaacaacatggatggagtctgtggggccagggggaacaaggcatatccaaggacagctagagggtgcagtggggggcctggagggagggaggcagcaggagctcggtggggccttggccacagtctaggtacttgggatcaggcctgtggttgcctgtgagctgctgaggaaccttacctggtaggtgatgtgataggaaatgcttgatttaagacgttgatctgtttggcagcctttggaaggagggcgggagggcgcgtgaagggacacagatgccccagccacggggtggcaggtagatttaggtgagaggtgggaggtccttgtctgaagccatcttggggatggagaggagagaggcaaatgtggacactcagccctgggcccaagaagatgttccactctacatggagagacagggtaaggagaggtaattcccggctgagggggcaccgagcaagggcatggaggtgggagagcccaggaatggcgggagccttctgctgtgctgccgagtgtggtcacgatgaagactgacatccggagtgtttagaaaccaccgcagccatttgacagagtcatggagtatgactgttcaatccaataacatgaaattgggggcttgtattttgtatggcttttcttttaatttcatttttctcataattcaagttttattgaattctgcaaaaatattggcccgtgactgatgggaaacaaaacacctggtctttctctgcagctggtgggggttggggtgggaggcgcgggttgaagtgccctccccatcagctcccataactctgcctcatcccagagttttattttttcttcatgccagaaaagtccctccccacactgatgccagcaagccaagcaggatgtccccacccccaacgctctgtccccagattctcctagccccaaagacatatcttagctcagatgaggtagagaccccctcaccccagctcaggctgaaagcgaatattgttcagtctcttatccctggggccaagcccgtgtaggaggattgtgtggtgaccgcagctggcggctcccaacctccagtccctgctgtcggcggccaaggccttggaggtcattaatgtggatcggcactaatggattctctgtgctggctttgtcccccagcgctatttttaactcattttggactttgaattgtccaaatgcattttgatgtgtttgtgagaaaggacataaataaacccttgagtgttgtttctgtgcagctcctcagaaaccaacttctcatggctctatttgctttgctgagagctgagcatttcctgcaacttaccaagatgggctgaggcctgcccagcttccagagtggcacctccacatgtactcatttcagtgccactaaccaaagcagtgcccattctcctggtagagtttcagggggaccccctctcacccctgatcaaagagcatggcagcccagtagctgagtacctcctgtgtacaggcacctgggagcttacgatggggcaggcactgtgggaaaagcaaaatcagaggccgacagtcccgtctccaagatccttcagtgaactgcggtgactgtgaacacacaggaaaccaagaggtacacgcccacaggccaacccctggtttggggacagccaggcatttatgaacacattcttcaggcagtgtttggcctgaatacatgtgctgagtccctgcctgttatctgaagcctgctcaaaggcagctaagatggaagatgtggcaggtggctgtgcaggcagcatatgccacaagccacagctgtctctttgacagtggccagggcttccttatatgagcagttccctaagtcactcaggtctggaggccagggattctggccatgcttctcatcttggccgggcccccagtgcagcgtgggcctaaaccatgttctggattcctttaaacacctcctgagcgcttggtgtgctcaggacttgagccagccttggggtcactgagggagtagagtccagcttgtgtctgggaaggtctcctgttggcagaggagaaggtcctgagctgtggacaccagtacagggccgtggtccagcctttggtgctgcaaagaaccccacctaagtcactcagacatgacactgtcttgaagacggagaatgaggaatggagccagcctcaaatgtaggagaggcgctaactcaatatctccaatcagaagaaatcagaaggttccttatttcaaaaatctctacacatcaaatgccgtgattggcccaatggctcaccagtcttcagatcaagtgtagcctgagtgttcttttaaagtgtggctttctagtatagagaatctccatgtcccatcacattggtttggatgtgtttatcaggctcattcatctctcatgagaacgtgtagagtttaaaaatctctaaagaaatccctggacgtaagctggtgtcttgggcttgggtagtaccagataaaacgaaaacacagacagatttaacatgcttaggggcaagcatttccaggacttggggatttattgggttgggagtgagagggaggaagacactgactatgattcctggcttccatcctgggccccctgcaaatggtgattatgaagatggtgggttggataggaggttctgagttccactttcagcatgctcactctaagtggctgagacgatggccagtgaagagtgttgggtctagaagcctgaagctacaggtccggctatggagctggatttggatgtggttggcacagagaggacacgaggccatgggagtaaagaaaatctgcagagtgcgaccagtataaacagagccgcatgcattttgccctggaaattctccttctaaaaatgtattccaaggaaatcatcagaaatgtgcaggaggggaggcttaaggataatcatggcagagttatttgtgcttataaaaactggaagtacccaaaatttccaacaagaagggcaaagttggattttgttccaaagcatggaatacaacctagccacaattacatcggtccatcgtggtgtggaatgctcaagtgctgggaggagcaagccagttccaggaatgcacaggaggcaatgggtttgtgtaggcatgtgtgcatactcacacagaaaacatcctggaaggttacacactgaaatgttagttccgatgatctgtgagtggtaaatttcaagatgaattgggattttctcattttcttctttcctatatatttttttctttacattgattctgagcctcttttaatgaggaaaaaaaatgttttgggtaaagcctcccttttggttcactagagacagcaccacagcagagctgggaacagttgtttaaacatccccctccctgactttaccttgggtaaatgggcctctgaagaaattccactgagaggccccctgccctcacattacattgtcaatttcatcctgagcactctgcgtaaataccattccagagcattaggtcgcagccattagcatggcagttatgtgccagcttttcctctcagtttacagcccttatcatctgcaactctgctttaagaacttaaaattatggtccgaccgtagcctacataaacattcaagaaagtcttaccatttggagagctgtaaaatgaatctgacagtgtgacactcacgtgcagcttcataaagtgcatgctaacgaatcagctgtcctgtcttcccagaagcccccagagcttccaggagccaatgtctccttggagcaatgctcaggagccattgaggccaggcacaagcacagcctgcacagccactcatgctgcttttcttgggatggaaaaccagggccttttctggactctaacagcatcgagttatagctcaaaagttgctcaaagtatcctctgccttaatgatcccagtatctaaactgaagcttcctaaacttcccaaattaaagacccttcccattgccacctgccaccagcagcactgatgaaatgccctctggcactgaaaccatcggtgtttggcataaacacaatgaaattcttgtttgcctccaaagtgtcttataaaagcttatccctcttagaccatggtcccattctcctgacaatgtagatggtacaaaaagcagccatccatcccgaggggctggcccagatcacacatcatggatggcctgtggttctgatccagcctgcagtggcaccattgcatatttacattttggatttttactaatttatttatttatctgttttttcgagacaggatcacccttggttgcccaggttggagtgcagtggcattattatcacagctcattgcagcctccaactcttgagctcaaatgatcctcccacctcaggctcctaagtagctgggacttacaagcacgtgccaccatgcctggctaattaaaaaaaaattttttttgtagagacagggtctcactatgttgtccaggctggtcttgaactcctgagcaaaagcaaaagcaaaagcaaatgcctgggcctcctaaagctctgaaattacaggcgtgagccaccacacctgacccttcaccaacatttttaaaacttagagatttcacagaaaaaccacaacattcattctcttgagaaaattgagaagatgtgaaacactgggcactttcgcagctgctgcaccttttagacaaagcatatgcttcccttcgactgctgtgcaatggaccaaatgcttgtgccacacccacccccccacccaaagttcacatgctgaaatcctaactcccaaggtgatgacattggagctgcggccttcagtagataagcaggtcatgggggtgtgaaacctcataaatgggattagcgcccttacaaaagagacccccgcccccacctaaagagctccctccctgtcttcctgccatgtgaagatgcaacaagaaatcagctgcctgcaacccgaaagagggccctcaccaaaacctgagcacgctggcaccctgaccttggacttgtagcctccagagctgcgagaaataatggttgcttgttagagccactcagggtatggcactttgctgtagcagcccgaactgaccaggataccctgcctacctggcccatttcagccctgaactgaccaggatgccccgcctacgcgcccgtttcagcccggaactgaccaggatgccccgcctacgcggcccgtttcagcccggaactgaccaggatgccccgcctacgtggcccgtttcagccctgaactgaccaggatgacccgcctacgcggccgtttcagccctgaactgacgaggatgccccgcctacgcggcccatttcagccctgaactgaccaggatgacccacctacgcgggcggcccgtttcagccctgaactgacgaggatgccccgcctgccccgcatatttcaaccctgaactgaccaggatgccccgcctactcggcccgtttcagccctgaactgaccaggaggccccgcctgcctgaactgtttcagtcctgaactgcctggactgtttcagccctgaactgaccaggacgcaccgcctgcctggactgtttcagtcctgattgatgcctgtgcagctttgggaggcatgaccgcacctcctcctccctacacaccccagtgggggaagaggagagaaaatacgcctcttccctggctcttcgctggagtcttagtgatttggtggagatttccaaggacaggcctccgggagctcagcgccgccctcctgttactgggcagttaggtgtgggaaggaacatactgacaacccatttttcttcaggaaaatcccattcaccacccttgaccttatattgctcagcccaggggtgtacatgggggaagtggtagtcacagggacagtaaggcaagcccagtctgtgtctaatgactatttcttcttcagatagttgagaatttaaatgtgaatgcaaatgttacgcaaatgaaattactcctaagacaatttacacagaccaactattagatcagaacctcctgtttaacacagcctgcccaaaataactgagactattccgatcttttgggcaaggatgtcgacacactgccagtgcctctggagttaaagtggagcgctgtctttgggattgggagccagctctggatatgaacacggctatctggcaggctttggcctgccggagagaaatgtgtcttgtcccatgagaaagacatccccaggctcacctgaggagccagaattgctggtgagggcccaggtgtctctaaattgattgctgcctctgatagactattctaagccacggccatctcgtggagaaattaaacattctgtgtgaaggacatgcatgtccttaacagaacagtgaagttgctgatgcatttttattctcagccaccctcacggcaccccagtacctaccccatgtcccagcctcatggggccttgctctcatctgcccattagctaatctgggctaagaagatgtactgcacaaaaagaaagaaggaattcaggcttttaaatgaaatgcccaatttgtaactgttggctaccaatgcaattagttagaaggtagttctcagacaggtgggacagttcttctcctaacaagcatgtgtcaaagcatgcttgtttcttctaacgttttgtttttctaaaaaagtgtgctttcttcttctaagaaaatctggcaaataaaatgttattctcctcatgttaactggaagagtcccttgcctccaaatcaattctatccccaaatgttgaaagacttgaaattccacgagtagatcaagggcatccccctgaggcctttactatgggaacagacctcacccccgctgctgtggtaactgtagggacccgcttcactcatgctgtcccttggcttctgtagacacttgagtctgcagcctcagaacagggctgatctcaaactgggcctcagtttgaggggtttcacccacgagtgactggaggccagcactgaaggctactgtgcaggactgcactctgtcacaggatagacctgctacatccagaggcatcccacccctgttcatctcatcctgggcactgtttctgctcagttctcaatggcaggcttttggccctctgaagtcagagaaccaaacccactgagaatttatttcttctcattagagatttctggattccataaataattaattcagaaggaagacacacactcttctcaaatgggaggttaaaatcagggaggactccttcccaagcttctaggtccatctgttgccatcagtggagatgatttggaaactgctttcaccctgattctggggacttgagccatgcagtcatccctctagaaaagactgcagggcaagttagagaccccatatagagtgtgtgatggtcaattttgtatgtcaatttgactaggataagggatgcccaaagagctggtggaaacttatttctgggtcctttctttctttcttttttctttctttctttctttctttctttctttctttctttctttctttccttccttccttccttccttccttccttccttccttccttccttccttccttctttctttctttctttctttctttctttctttctttctttctttctttctttctttctctccttctctccttctctccttctctccttctctctttctttcgatgcagttttgctcctattgcccaggctggagtgcaatggctcaatctcagctcactgcaacctccacctcccaggttcaagtgattctcctgcctcagcctcccgagtagctgggactacaggtatgcaccaccatgcccggctaatcttgtatttttaatagagatggggtttctccatgttggtcaggctggtcttgaactcctgacctcaggtgatctgcccgtcttggcctcccaaagtgctgggattagaggcgtgagccaccgtgcccggccatttctgggtatctctatgcaggtgtttccagaagagattagccttagaatcaggagactgagtaaagatctgccctcaccaaggtgggctgacatcatccaatcattgagggcccagatagagcaaaaaagcaaaggaagagtgaattctctctcttcttgagcttaggcctccatcttttcttgcccttagacattggagcttcaggttcttgggcctttggattccaggacttacgacagtgccccttggttctcaggcctttggtctcaaagtgggagttgcaccattggctcccccagttctcagggctttggactcagactgaactttaccaccagccctcctggttctgctgtttgcagatggcttatggtgggacttcctggccttcataatcatgtcagcaaattcccaacataaatctctccttatatatataactctagctatccatccatccatctattcattcattcatccattcatccacacatctacctacctatctgtctacacatatttatcttacttgttctgtttctctgaggaattctgactgatatagaggaattcactgggatcacaagccaggcttttaaagaaccactgggcctgggctgcttctgactctgaatactccatgttataagatagcaataataatacctactttagtttgactctgtgaccattagatgaggtaacatcttataaagctctgctcttaataaacaacatctgcaactgttgttgttgctgctgttatttttatatcagtcaaggttttttaattgcaagcaacagaaatcaactctggctagcttaagcaaaagtgaaatttaatgggaagatattacagaatgcatcaaatcaaaggaacaccgagacagagacatgcaagaaacagaaacaggggccactccagggacccaggcaggcggggctaattggcagctcatcaaccctaaccattctattcatccttgcctcatgtaccttgagagtcgaagtcccaagaaagaagccaactgggctgtcttttgtcacattcctattccttgcctaatgcagtgagagtggcagggtgccctggttgacaattgcagccagcctgcatgcaacagagcagagggaaccaaagggaaccagggatccttttaccagaagaaggtatggctgccacacaaaataagcacatctgatgcaaaccatctttgacatgtgcagaagcttactgtcctctgttcttggtatgactggatgatgtaggcagagcagccagaggcatgaccgtcagctttcattcctcaagaatgggatttttcttgtgcacttctcttttcttatgcatagtcctcaatcaccttggccccagagcctgcccagccagacttagcaggactgggtcacccagttccccgtggcagaaatgtcacagtcattcaggagcatccacatttgggctgggatgacaacacaaatcctgcagtaatttaacacctgctctgcttttatgctgttattaaagagttttagcttaaatatttgaggtgtgactctgctccctcatgcaaatacgggtgcagaatttcccacctggctcattgattggtgggatctgaaatagcccctttatggaaaatggtaaatttcttattactgcctaatgaataaagtgcatatgatccagctgcagcagctccccactcccctctccttcccagggaaactcatcccattggtaattgggggaatgtaaatgctgcttcatggcttaattttcagatgttttgaaagacaatatctgcagcaataaaaggctcaaagacatctgagatatgttttgtctcttgtcctaattatactaataaataaatagtatttgtttccctgcactgtaaaattaaatatctttctgaatatctcccctcctattttaatgaggagaaagatgctcccttgatgagaatgacactgtagatgaaaaacgagaaagaacaaagaatgttaaccatctaaatacaataacatgagaagaactgtttcctaagttctgagtatgatctctgggtgggatattctccttctcatcctctttgtctggagaaaatgtctctcaaatgtatgctgtttgggatctctgtaaatttgagtcctcaagggaattactgttgccttacctacagatggcaccttgtggggtatcctcgaacactgccaagccttggcacccaggaaccaaatctccttgtaacttctgcggaaattgtgagaacagggatctttccatcttactttccaccgtcacctgagtgcctaaagcagtgctcagcctgtaacgggtgcccagctatgtcacatttgtttcaggagcactcctgtggccctgccaagtctcatgttcaagttggatcccagcgttgggagtggtgcctgacgggaggtatctgggtcatggctgtggataccccacgtgtggcttggtgtgattctcactcttagttcctgtgagaagtggtcgctgaaaagagcctggcacctctcctttcttgctctcttgctctgtgatctctgcaaatgtcggctcccccttcaccttcccctctgagtggaagcttcctaaggccacaccagaaacagatgctggcaccatgcttcctgtacagcctgcagaaccatgagccaaatcaacctcttttctttataaattacccagtttcaggtattcctttataggaacatggactgagacaagcacagatcccaggaactgggcagatatctgttttccataggctgatggttgaggtcgcagctctgcccctcactgaccggcaggtttgcagcaagcctcattctccatctgttaaatggggatagtcccaaagaaagacagctgtgactgaattatttttattaaattgtctgcccagacctcagtctctccaaccacgaaagagggatgtaagatgagataaccatgaaagtccattgacctcggacacggtgacactaaataaaatgttcttagtacgctgactcagaaactcctcaaactaactgccaaagtgcatgggctgatccccctgcccccatgatgctgctggctggagggctgtcctgaagtccagtgggcagccaaggccacgcctgtgcctgcaccactgccggccctgccctaccactcctctctggactcatgtccatatcacagctgattgtgaaatccagctccagcatgttgtatttgaggagcttatttctcactaaccacatttggcccacaggcaaggcaattaagggtgttcatccatttactaaccccccaccaccccctgcagtgccccgagagtgggaaggtggcagagctgctatgcttcagagcaggttccctgtttccacttcagagcccacttggcactgcttgaaacgccctggatgtttgttatgaaagattattgggaagcagtgtgactgggcatgctgcactgcttacaacagaatgggaatgcacgctgcctgccgctgagtgggagagccccacccagctctgaggcaagtgtgactcacagctccctggcctctccgatcccatggagctgaggccactgggccttggtgaatgttatataatgtctcacatggaagaacatgcctaccgccaagggcaggggttctaagtcccagggccagacagggacagggtggtccacacccctgcctccatgctgctgctttctgaaaacataggctgcagaggctagcatgtctctcaagtctggaatcttgggtgggcatctccaaatgttcctcttcctactcaacaggtccagaactggccttcagattcccagtaagaggatgtgtgaggctcttgcaggagtttgcagctacctgtgaattatcatgtcaagaagcaaatttgtcatccactcttgtgctttgctgagccctatcctggtgtttgactcagatgctgctgtccgcagaaactggcccatctgttgaaactggcccaattttcccatagaactgatgtttgtgggttttttgaataaatgtagaagttgaccctcccagtcttcaagcttgagaaatttacatttgtccgatttcctttttcaggaagctgaccatcaggctttccaggtagtgtcagggagctaaagctttccagataattgtatccaggtggtgaggccacctgctgcctgttatcagctcctgtttaaatgaacccctgacaatagtcacttagggagatggatttgagacttgtctcccatcttctggctggtgtcacccacaacaaagcctttcttccctggcaatactgattgtttcagtgattggctttctgtgcagcaagtaactggatctaggctgaatcctaggtgtgcagcaacaatatgggagccaagaaagcccccttcaagccaggtgtgacttagcagctccttctctttgtggcactgtctctgcacttctctgtctttctccatccttttgaagaaaagggggaataaataccaagagaatcacaaccactgcctccctgcaggagattcatccccctacctcctacctgaaggtgtttgcatggagcatgcggtggggagagctctttcctgcccatatgaccccttgttcttagaatcctggagatgattcaatgaactttctgtttccagtgataaaactcaaaataaacagaattaagtgaaaaattgggcattggcccccagtaaaaacactgtatctcctttcactcctgtctccctgaaggccatcttctctcagcttctccctttatgaagtctccatcagccctctaccctcgttccagaattgagtttcttcttgtctggtatgtttacagccccaggcgtggcttacttcccctgtcattttccactgttggctagagaagggatagcatgaccttctagtctgtgttgcagtctgccttatttcttgttttcttcaactgttccagagcatctaaagtaaacgagtcacattttatactgcaaaagacaatctgcagaagccctcattggtgcatgggaagaaaattatgtcattgggttgacataaaatattcctgtccttatgggtctttcatgtttctgcatgtcttgtgagcagagggactggctgcctttgttcagaacaatcttaaaaagaatcactgtatagtgaacagccttggaaggtaaagagaatgtctccctctagagcaaaggctaggtttgcttactgcccaacataaaagatccaggttctcaaagctcagagctcctctcctgcaacacgtccactgagtgtgcagatgtcacctggcttttccatcaccatgtgggagtcagggctcaagaaactagcacaagaaaatgttgatacttgggctattgctatttctgtgagtaataaagttctttgtctctgacctaggagtcttttgtcctctgccaatgtccatgaaattgtggcaggctaattgtgatgttgtaaaatatatatttggtctttgacaccatttcctggcatacaactcctaaattccttggactcttccaagtgatgtcttcttgtatgctaatgaattggctgatggctgagagctcctatatagcttcaagagagaagctggtcatcagaaagaccaaggcaggattagagtgttgggactccaggaagtggggaggtgctgaaggttaagttgatcaccaatgaccagtggtttaggcaatcatgcttatgtaatgaagcccctgtaaaaacccataagaacagagttcctctcctagttcctggaaaacttccagatagacaaacacacagaggttcctgcaggatggtgcaccccaggtagggcatggaagctctccatccctttccccataccttaccctacacatttcttcatctgtatcctttgaaatattctttataataaactggtaaatgtaagtaagtgttcctctgagttctgtgaaccattctagcagattaattgaacccaaagaggaggtcttgggaacccccaacttgaagccaattggtcagaagttggggtttccaaggtcccctctttgggttcaattaacctgctagactggctcacagaatgcagataaacactaatttacatttaccagactttctactagtgcctgaagtagggtgggatggtcttttgggactgagccctcaacctgtgggatctgatgttatctccagttagacagtgtcagaattgaattggaagacacccagctggtgtctgatgcagaattgattgcttgcttggtgcatgggaataaaaaaatgcaacatttttccactgaattcttctgtgttgattgtcattgagtgcaagaatgtgaaaaactttgtgttttttctactcactaacttatcttgcaagtaaggtaaaatctcattaccttcagagttcctgacaattctctctgctaatgtaattttggctgtacaatgctaaaagcacatttgtcctctgcccaatcttaggttatagaatctaacataaatgatgacttgcccaaccagttcacctaactgggttctgcttccagggtaataagtaaagggtagttcctatacagacatcttacatttcttgttaaagtgagtctttgtttggtccttccaaatggctcctggaatggtttatatctgtccttaccaaatctcatgttgagctgtgatcctcagtgttggaggtgggccctggtggcaggtgattagatcatgggggtggttcttcataaatagtttagcaccatcctcttggtgctgttctcgtgatagtgagtgagtgatcgcaagatctggttgtttaaaagtgtgtggcaccttccccatctctcccttcctgctgctctggccatgtgaagtgctggctgtccttcaccttctgccatgattgtgagcttcctgaggctcccctagaagctgagcagatgccagcatcatgcttcctgtacagcctgcagaactgtgagcccattgaacttcttttctcataaattacccattctcaggtatttctttagagcagggtgagaacaaactagtacagttcctaccgtgagacctgccagtactgaggagagaaaggtgttccatatgcatttgcatctggctttgccgttaaacagcaccctttccagatctccagagaccaggtggtaggaaaaacagaaggttgagatagagggttccaaacactctctgatggatggcattgcaacttgtcccctgtgagaccctcacaaatagctggcatgcccatggcctcccccaacagttaccattcctcactgcactccaagtctctccatagccacccccacaaccattgccaggtaggctcactgggtgtatgcccgaagtttccatgtttaagatcaattccagaaggtctctccatgaaagagtggccccagcccctccaccaccaggcatggtcatctccccagggctctgtctgaaagagctttctggtaatgcagttgacttacagaacagtaggatgtgggacagtgaagtttcaatagaatgaaaggtcttgagtaaaagcaatgccctgtctggagcagcaggtctggaaaccaggagcagggatagctgagatgcagaaaaacccagaagatgaaacgggagaacttctaagctgtcaggttcaaaaatgtccctaagccttttgtgtcctgctctcctccctgaagacatgtgaagacacaggaatacacgtgtcttctcctcccctcttacgtgaagacacgtaggaacagtatctaactgaggcactcacacgatggtcatcttcaaataaggaatggacttttctgggccctctcacagccgcctccagcacttgacttcccaaccccgttctgagctcctgtgccggagagtctgggctaggtcagcggggtgggagaggcatcaaagcagagatgagtacacaggcacactgcacggagcaagaggcgttatagtgtgatacagcaagaggctgtggaaggagcagagaatgagtcctaggagggaggtagagaaatcagggaaggctgcacaagggatgtagcacttgagctgatcctgaagtagaaggagaagcccctgctgggtgaagagtacccatcttacagaagtgtgggagccaaactttcacctgcaggagaaggcacttctcacctgagcttaggccaggggactccctgctctgaggccacactcctgacagtggtcacatctctgtccgacagctatcttttgaatgtccactaagtgccagccactgagccagacaccggggattttatacattatcaagtccctgctgccactgagaagatagacaaacaagtaaaaaaatcataattttgggttggaatcagtttgtggaggatataataaaacagggtgatgtggctaagagcctttgggtcacagagagggcttctctgaggaggaggtctctgaacatagacctgaatcaatgtgaagaagccagctgtggctctggggaacaatgagtcctggcccaaatgtaggcacagctgtcccaagaccggcatgtctgaaaaacagtaagcacacacgcacacacaagcatgcacatgcacacattcacatacatgcatgaacatgcacacacgtgtgcatgcatgcacacgtacacacatgcacatactcatacaacgcacatatacacttatgcatatacacatgcacacacatatgcacacacacatgcacatgcacacacatgcacatacacatacacatgcacacacggacacgtacacacatgcacatgcacacacatgcacatacacatacacatgcacacacggacacgtacacacatgcacatatacaatgcacaaacacatttatgcaatacacatgtacacacacttgcacacacacatgcacacacatgcatgtacacatacaatgcacatacacacttatgcacacacacatgcacatgcatatgcaaagcgcacacacatacatgcacacatgcacacacatgcactacacgtgtacacacatgcacatacacacaatgcacatacacacttatgcacacacacgcactgtcctatggggctggagcagatgggggagaggtgggagatgacgtcagaggtgcgtgtctgacagggtctggagagcactttgaaaacataaagagagacaggaaggacttgactgtgaacccactgctttggctgctcagagggcaaactgtagggtctagggtatccctgtgctcacagaaggaggccttacccagtggactctccccttctcttcagattcatccaaagctggaacagccctggaatctcagagaatcaggatcttctgtctccagagaagaggggagctctggcccccttgtagggaagcagcttctggactctcctgtctccctgcagccaacaaccttcttcccagcaacccccgacatacacccctgccaccctcagtggttcccgacattgatgctggtgagggtgagtgcttcacccagtcctcagtgacccgcaggctccactaagaggtccagaggggccctgatccatagggaagaaagcagaggggccccgacacagctccacggtgctgcaggcagggctctcagtgcctctcagtgcaggcttctgggaaacagactacccctcaacaattctagtcacattcccttcctccataaatggggccagtgggatatggagaaaatttgtctggtttaactaggattaccctgaataaaccattttcctcgtcttgatttaccattgagaagctgggccctgatgaggctgtgtgaattacgattagcgtcctgccctgcctggggtttaattaattcgtggggctggatgcctggatagctcagggcactccctgatgcttggggctagcaggcagaggcgcccagcgcaagtgcagctcactgaagcttccgcactgggcttggcaacggagtgttaccttctcattagggaaatggggagtggagccctccagaggctcccaccccctggactcctggttcctagcccccagtccatagtccagcagctctcctggtgtggaggacagggacttctccattccatccctttcaatctccttcacagcaggaaggattcctaagtagcatgattaattagtcactggagcaagggagggaacagagagagacctgtagaggtcagaatttgaagagcccgtggaacccagaaccaatcactgttcatccccacctccctgacccccttggtcctcctcctccttcccagccctccgcaggctcccctcacattgactgtctccactcgacttcagggttccctgagcctcttagggaaaggacgttggaacattagaagggccttggaggatgggaagtgaggtgagtgaccccaactgtctggtgcatgctgttcactagctacatgtattttgtttgaactctagaattttgcaatttgtgcaacttgaaaaaagaagagttcccgtagaaatcaggatttctggaaaatctgaaaatgttgccacattgggcccgcattccctcctggtagcagactggattaaacagggctgcctgacctgtgtagccactatggcctgcacgccttgctcacctgaccagctccgcccctgaacacacctgtgtcagggaagctcaccttctagacaggggctgggcctgagaggtacccagaagccaggaacgcaggaacagagcacaagacctgctcaggaagccacaaaggcgctccccaccttggggaagagtcactgctaaccaacagtgggagcggtgtgttgctggctttctgcaactgggctgagagggaggcatcccaggcaggagaaacagctggaaccaaggcctaggggaggaaaagctggggaattttaatgccagctaagttgatgttaaatcctggtgacaggccaagcgtggtagcttatgtctataatcccaacagtttggaaggctgaggtaggcagatcacttgagcccaggagttcaagaccagccctggcaacatagcaagtccccatctctacaaaacaaaaaaattagccagatgtggtggtgcaagcctgtagtcctagctgtttgggagactgaagcgggaggacatcttgagcccaagaagtcgagactacagtgattgcaacactgcactccagcccgaatgacaaagcaaaactctgtctaaaaataaacaaatacatacatacatacatacatacatacatacatacataagtcctggtgacagagaagttctcaaaactccttcttggacacattttacaatgtttgtaacatcatagacatcctccatttgacatggctcaagcagcctctgctgtgaagtggcatctggaccagaaacagcatcatatcaccacacatggatgtctgatgtcttcttttgccttaagaaccctggtttctgtcatgaggtcaacctgtcgaggaaggaggcaccatctgccctcagcaatgctgggggctgccaggggatgcgggcagtcagcacagttctttttttttttttttttaaagtctcgctctgttacccaggctggagcacaatggcacaatctcagctgactgcaacctttgcctcctgggttcaagtgattctcctgcctcagcctcctaagtagctgggattataggcgtgggccaccatgcccagctaatttttgtatttttagtagagatggtgtttgccatgttggccaggctgttctcgaactcctgacctcaagtgatctgcccacctcggcttcccaaagtgctgggattacaggtgtgagccactgtgcccggcaatggcacagttaattctccagaaagtttcccttgcatattctgcatgtattgggggtgcatatgtcccagaagtaatagtgacaagcaggtctgtgcctccacgaccaagctgggctcacagcccaatgagaccttggttctctctgctccctccttgctcgcgtgcctatagttagatggaaactcgacctccgtctgccagggaggcccagccaatggccaaccagcaggtctgtggccctgacacagacatttatgtccctgcaatcctcagaggcttcgtgcattattcagcacagttcccccagccatgccctggccctgtgcagtctccagagggtttccagagcaacatattttggagctgaattacaagatcagacagttggggaaattcctgctttaacacaacacctctgagataaaatttaatggtggaagaaatacggtattttgaaaacatgaaaataaacattctgcagaaccgggatacgaagtcgcacagtacagcctgtgaaagcctctctgtcacagaagaggtctaataatttttaatagtcctgtaaatctcccttatgagatgcagctactgtaaacacttctccataattttttcaagtatttatgtagtgctgttagaagttattaaacgcgaatgattttcattgataactctcattctgaaggtgctgccaaccagctcaacctaaagatggtaaaagggaaagtgtcccccacagggtcaacttgggctgctcctgggatcttctttctgaactaaaggcagtctgggaccattctgaacttgcctggtgatcggtggcaaactcattcactcccccactgccatctcccacgttatgaaatgagaagaaatcattcctgcagttcatttatcatttttgcatgtattagcgtgctggcaggcattttacaaggccctgggaatagaacggcaagaaaaagagacaccattcctaccttcatggagcttgtggttccaaggcaaacaggcatgaatcaagggattacagaagacggtgtaaaattgtaaatgtggaattattgtaaagggaagctaacacaggtcatgggttgggggagcatcacagggagatgcccagtcttcaaggtctgagaaagcgtcctcttggcagaaacccttgtgttgacacctatgagatctgtaagactagaagaggccaaataggccaaaaggggagaaaaacaatggaagcaggaggagcaccagcaaggccaatgtgtgggaagaggagtaagacatgttggaagtgagaaaaggctgggtggctgggaaaaacgtctgatgggaaacatggtcggagaggagcctggggaggaagaaaagagccccgccaaggagggccttgtaggacaactggtgtgtcttcatcccactgtcaggggagggcctttggagggtttgcagcagagtagggaggggtgctatagatgagtgtgcttttgaagcgatcactccagctgcaatgtgatacaaagacaagggggttccgagtatcaacagatggaccagcaaggattctgctgcatgcctgagacagcagtgaattgaggagggatgaagaggggtcaagggtggggcggggtggtcctcaggcttctagactgtaccatttaatgaagtgtggcaccattcactgaaatggaaacatggcagaatatcagggttgtggggtgaaggtcatgagcttgtttttggaccactgagtttgggatgtctatgagggagatactaagttagctccctactcaggcatagagtgcaaaggaaagccctggaatgaaggtgtaaatttgtaagccctctgtatgcagatggtgattgaagctatgagcatgcatgcagctttcttgagagatgatataagagaacagaaatggattcatccctgtgaaggccatcatttggtgaaatcattctccatctgggttgcacatgagagtcatgaggacagctttagaaatgctgatgcctgggttctagctacagaggttatgattttatcgttgttttggtctggtatgtgacccccgcatctgaaattgtaactgcttcccaagtgactctaatgagcagctaaggttgaaaaccctcacttcttagctgggaagtggaaaataaactgcaaaggaaacagaacatatcaggtagagaaatagagggaaatcaagtaagaaggagtggtcagagtgcctagggctgctgaggtccagcaataccagaactgaaagtgccgctggatttagcaaactgaaggtcgctggtgacatgagtgaggtcactcattatcatcttccgtggcctctcaaaggctgaaatgatgtggccatccaccctgctcaggctttataaagatgacacaggtggcatccaggtgtggggtttatgagtgcagtcaagggtgatggggacttattgctgctctgggtgtgtggagggcaatttgtctatatctatcaaaattataaatgtatgcatcatgtgtcttgataatcctacttctaagaataacacaatggcatatgcacaaggttattcactgaaacactgcttatataatagcagcaacagactggaaatggtgcaaacacccaacgtcagggcatacacaaccatcaagagaaatacagacacctgctatgtcctgccagggaatagtctccaagatacggtgtgtgaagacagacgagtgcaaaaacaggcagaatagcagtgttggaactcctgttacacggaagcggcccaaagacacccatttgcatgcatatctattttctctgcaaggacacttgaaacaggtgaaattggttacttcctgggacagacactaaatgtgaggtgactagggaagggaaagagagagagagttttcactgtatttgtgacctttcacccatatggctttcaaaccattgaaacctattgaaaataaaaactgatgagaatggtatttccctgagaacaggggagggggaggctgtattttggggtgtaaggaaagcagagtttttcagggaccacacctgttactttgtatcccaattcatttaagtgtgctgatagttttcattgtatttgttgtattatttgtttgaaatcaacaagattgcaagaactgggatgtgttatttagagtttatgctggaagactgattgttcatcaatgtcaaagatacactttagagataatatctcactcctgaagtccttattatttccagtagccaaactcaatttctgaagttgatataaagctcactgggctaggaagcaggagtctgagattgggtcttagttttatcaatagcgtactcggtggccttaggtaagttgcttcatctctcttcactttagtttcccgtccatgaggtgaggttggtaatccctggcttagctgattcccctaaactctaaggaacaaaggggaccacagatgtacttgtacttggtaaaatatagacacctacaaatgtgatgggtctgctatttttatcctattgctgcttgaactttgaaaatctatttgaatacatgcatacacacatgtatacacatgcatacatatatgcatatatatacacatacatgcatacctgcatagacatacatatatacacacaaacatatatgcataaaatacatatatacacacacacatacatgcaaacacatacacatatatacatacacacatacacacaagcatgcatgcacacacacacacctctccaagaaactgaagacatccacattttattacaggacaaagactgagcaattttccaaacctccactcacatgcccaggaaaaggcaaatggctatcttagctaagccagaactcttgcccggaaagctagcttggctaatttcctgagaagcccacagggaagaggcttgaggaacagcacctgtccaccagccaacaagattgatccctggcctcccttggcggggctggcaggacagtgtagcaaggcagctggccaaactctccccaaggctcgccgagcttttagctagtgatcaggtctgtaaagcctgacctttatcgtaggataaaagtaggctttgttcattcatttcatcttccctaaaggtaccattagcgatttattgatttttctttttagagaaaatcttaaagtttctttttaagacagagatttgagcctgtgcatctaaccctccccaacttccaccttcctgctggcatacaaaacagggaaagactgtgtcagtgctgaagctccggaggaaagagagccccttggcagaaacactgtagacttctgctgggccaagagctggggaaggcagactgcaaggaggacctaccttacataggagaccacgtttgcctggaaggcgagtggaggaaaacccaggggacgccactagtgcctcagacttaaagggagagctggactgcagatgacgatggacagaggggttgcctggggtgcacaggaatcccaccaatatgcacttatgcaaagtggctccaaactgcacccagtcaagatccaacagcagttattccattcccctcattgtcaaagtcctcaggaccatcccagttgatgggagatgaaggaacagagacctcatacactctcccctaccccctttcttattcccaccagtggcacaagagggttctaggtccccctcactcctttatcctgtcccactccatccttgatggaaggagtcttttagcagaaaaaaagtgaattaaataaagcccaaatgtagtgagagaaaggtgtgtctgtctacaggtattttactatgagaaaggtgaagatacaaggaggcaagatttgaggtgggagctgggaggaggaaggaaacccaagagaaagagatgctcagcagatctgggagaggagcccggcactgactgagggagttgctgaagtgcctcttgattccaggtgctttgctgctccctgacccgcatggtgggacccttcttggtgacagggaaagcctgcagccctcccagtcattgtcactgatggaataaatgcatagttctggaaataagtcctctaaaattctgctcaattgtggcaccatctactttttacctctgtactttcatttttaattccccaaaatgttttactataaattcttattagccaaaacatgctttaaggattgaaacaaacaaaaacctaaaatgacttatcgtctcctgcagaccaatatccagggtcaggctgggcacagtggctcacccctgtaatcccagcactttgggaggctgaggtgggaggaatgcttcaggtcagcagcttgagacatgcttgggcaacattgtgagaccctgcctctacaaaattaaaaaaaaatttcacgtgtgatggcacacatctgcagtcccagctacttggaaggctgaggtggaagcattgcttgagcccaggaggtggaggcagcagtgagccctgattgcactgctgtgctccagcctgctgtttttgaaaaaaaatcaaaaaacaaaaaacaaatccagggtcatgggctggacatggctggacatgggctggacatgggctggacacataggagcccactgatcggccttcctgtcgtgtcactgcccgtgacaccaaatggacactcatctccttcaagctctccacacccttgctccctcaggccccttcacaaatgccagctcagatgtcacagccttgaaggaccctgctcatcccgaccccaaggggcggaactcatctcgcccacccacctgctgctcatcactgagtcctcaccagtgtatgaccactgcccattagactgcgtagagtcagtgctcatcactgccacctccacagagtctttcccaggacccagctcaacgtttatggatggaggctgtgtttgaaaggtttccaggttgagtccccagacagccaggtatcacggtagccaaggacaggatgtgccagaaacggatgaagtcccgcccctgtgccaactctttcaattctggatgcagctctgcaactgaagctcccttatcatccccattgcacagggatgatgggaaccatgcggggtcagtttcactctgggaagtggtggagctggggctcgctctaaggggacagcagagctggggctcgctgtacgaggcagtggggctggggctggctgtaggaggtggtgaggctggagttcgctctagggggcaggggggctggggctcactctaggaggctgtggggctggagtttactctaggtggcagcagggctggggctcactctatggggcagtagggttgaggctggttctaggaggtggtggggctgaagttcgctctagggggtggtggggctgggcctggctctaggaggtgatggggctggggctcgctgtagggggcggcggggctggggctggctctagaaggtgatggggctggggctcgctctagggggcagcagggctggggctcgctgtagggggcggcggggctggggctcgctctaggaggtgatggggctggggctcgctctaggaggtgatggggctggggcttgctctagggggcagtggggttggggctcgctctagggggcgggggggctgggactcactctaggaggtgatgaagctggggtggaccctggcattctgactccagcactgtgtgtctaatgatcattagaaaagtttccatacttttttcgctttagaaaaatggtgctgtgtcacagcttcttcaagagtcaacagataagctgtatgtgccatcccctgtaaggctgggaaagagccattgctctccaggtcacaatggccagggagcctttgcccagaccctgaacgctgagcaaaggtcacgagtagggagttctctctggatcagatttttactccaagtaatctctcccagccttgcagtgtggtgtttctaagtacactccaaagtattgccaaagatgaggcagtcaaggaccagcactcacacagggccttaattactcaaagatctgtgtgtttactgaatgaagatatttatgccattctaagaaggtttacacaggaaaggtttacaaaaaaaagaaaaggaataatagtttgctttatgcaaaatcttaggcttaaagtggaattgactccaagattccctaggatatagaactctaatgccacctttagagcaagctttctctactatggagttttcgggacctgagctcacagtcctctcccttccttcctctcctgcttcttcaccctctccctctctctgttgcctccagggtcgtagggccattctgcattctgccctaacatctttctgctatctgggaaaagggcccatgcccagtgcttcagggcaatttccagctacctccaagcccagagaggtgctctcagcatggggcctccactcaccctgtggcatgactccacccacccacccactggagcattcctgccccccatattctaccccctggctgtgaaccttcataagaggagggagtgggggcacctactttgtgccctgccacaagattgggctggatgaaggccatgccatgaagaaaacatcagacaagccaaggagggtgcaggctcttgcatggatcacagagttcccagggcagtggagtgaggccggtgggcagtgtggacagtatgtgccccagagtccaggaaggcagccatcccattggcctggggcagggggaggaggatcaaacccctttgccaagaaggggatgatcataggcccttcccctgccccctgccctcactgctggctccctgtcagtcctcgagagggcacggcacagatgtgggtgctgcttctttcccgtgggtggtcttcattttttttttttttttggagaccgagtcttgctctgtcgcccaggctggagtgcagtggtgtgatctcggctcactgcaagctccgcctcctgggttcacgccattctcctgcctcagcctcccgagtagctgggactataggtgcctgccaccacgccccgctacttttttgtatttttagtagagacggggtttcaccgtgttaaccaggatgatctcgatctcctgacctcgtgatccacccgcctcggcctcccagagtgctgggattacaggcgtgagccaccatgcctggccagtggtcttcattttaacacagtgctgcaggacaggcatcctgggggaggacagggaggggcagagggtccctgtgcagttgaaacaactctcaccctaaatgttcttctctctcagtggatttccattgctttttcctgcccagcatccattattcccaccttttggaaataagatactatttttttctgtcagcttgtatagagcgtgagaggctgaccaaccttctggatgtgggtgtgggtgcagaatgcaggcctggccaagctgcacttcattctccaggacacagtgattggctcagaggcagcaagtgacccaagacccctcagccagaacaattacgggttcatttgcaggacagctgactgccctgggcaaggtgactttccttaatcgggattattaaatggctaggatatgaacttggagctgctggctctgacaagagggaattgagcttgaaatggagtcaacacaggataatagaatcagcagatggtgaacataagattcctgtaatgctgaatgtaatgatgacctccttggagaccctggatccagccttgcctgaaagccctttcttggactttttagttaagagggacaatatatgtcctttttagtttaaagcaatcccagttgattttctacagtttttctctgtgattcctgattaatacacttcctttggggagaaaatgacacagcactttatcctcctctcatctggagaatgtcccttcctcaaaggctctactcttctctcttgctcttttctgtttcttcaggactcatgggtggacagtgagttccctatcactgaaagaaggtatgtgatatggtttggctctgtccccacccaaatctcatcttgaattgtagttcccataatccccacatgttgtgggagggaccaggtggagataatcgaatcgtgggtgcagttatctccacgctgttctcatgaaagtgagtttacatgagatctgatggttttataaagggtttcccccttcacttggctctcattctctctcctgccgccctgtgaagaggtgcttctgccatgattgtaagtttcctgaggctccccgagccatgcagaactgtgagtcaattcaacctctttcctttataaattacccagtcttggttatttcttcatagcagcatgagaacagactaatacagtatttgatgatttgttgcctacctggtggcaatgtggtgaagggaaaggtgtttaactaaactctgcttttccttcccctctaatctaagaccttatatcagtatctaatgggaaccttcccatccgtcaaatgagagggcgatgaacaatcctaaatgatgggacacatttgctctgtgtcaagcactgtgctaagtattccatatgttcacttctttaaccccaaggcgctgaagggcaggggttgctgcccactccttgccaagatttaacagctgctggaggctgtatggcttggaggctgtggtgatgtgcagatcccatggtgtgagtgcaggctcttcactgctaggtgagttacgggacctggtggggcactggactggtgcgcactcctctccacttcctgtatggatagacacctgctatctgtgcctctccacctcctctccttccctctctttggctaagacctgggccttgatgggagaaaacaggttcagagcagtaggacctagggagagaaaacacgtgagcataaaataggagtgggaaggagagggctggtggctggggcagtagagggagaggttcccctttagaggttgtgagatggaggccctggtgggtcaggggttgtgggagatgtggaggagaagagatagaggacaagtgtgtgtgtgtgtgtgtgtgtgtgtgttataggttgggttccttttaatcacttttgggagaagttcaagactttaagttattattattactactactcttttttatttttagcccagatggtgtgtctctatagggactggaccacacgagtcaggaagactcatatcagagtttgattgcgtatttctccatctacccacccccgactcatccatcatcctctctccctctctcctccctccagttcatgggaagttagcatgagcattctgccagcagactatggagaacagtgcaggggggtgaaaatgaagagacagttaagagagcaacacacggggctaagaggccaagctgatctgctgggccttacacctgggtgtatcagtggaagtgtgatgtggacagagcacccgagcttctctccagcttaggagcagtccgcgttgggggaaagggagggggttgtttttgttggctttggctgtctcccagcccattagggatcagggtctatgctgtgtgctgtgtgatgctctgagggctgccttagctccgggtgaaagaggatatctgttagttttggaagtaccagtgtcaggcagctgagtgttttcggctttcaaagatgatgccctctgtgctcctggagccattctgctaatggaatgtggggcctgttctgagggattaagccaaccctgtggtcagagccaggggtcactgggtgttctgtctcctggaagtgaaaggaggtggtttcacaccaatgattaggaaagcagtgagcatcagagtgggtctgattgcagaagctctgtgtttgcaggagaatccaggctcctggggaccggaggttagtcctggccataagtctatcctggaaggatagacttgaagcaggggacagtcacagtctaaatggctttggggcacatggttggtactgggtaaatacctgctgacttgaattaaaagagagttttgtgatttgactccttaaaataatgtttaaatgacagatgcctccaaggcaaagcaacagaagctgagattatgaacaaggtcccagcacctgtgtcctctgtgaccgatggttcaggtgttgctgctaccaggaagtgatggagagagtatctgggctgctctgggtaaatcccatcctttctctgggcctcctctttctgatctgtagaatgagataataagagtatctcccttacggggccattaggagaagtgcgtcatggccgagggcactgcatggcccctgctaagctggcaggtgtggcccgggtctcctgcttccagttctgagaattccaactctgaggctgcttgcctaacaaaagcttgtgtcccggcttgcacagaatcacattgagggttccactttgttcctaatgaggtaaatataacagcaggttccagtgaaacaatttgtatgcccatttgaagcaagacttcagctctgccatgctcatttccaatacatttgttactcttacctattcaatagcattcagatcattcaatgtctaatggaaaccttcagtctccctaccctgtcctgttcttacttcttttaccctaattcaattttctctgtttcatcttccctgatgtttcagaaacatcatgattcaggccacacacacataaggagcatccatcagggctatgacccctccagccctcacgaaggtgctatatggttcccagcagtgggggagacaggcacactgttaccaggttgccctgcgtgagccagtgagacacgggtgctgatggccatgaggtggaccgccaggacccaggtcccactctggaagccaggttcatcggctcttcactcttactgctgggaactgcacggggccttgggaagccctctttttccttctgaccaccggagggcagaaaacttgcagggctgagctgtccatggtgtcacaggctctgtccactgagaccaggtgtgagaacaagaaatggacactatctaaaagggagggagtgggaatgttctgtgtgtacacacaggagccctggaggagctcggtccatgcctggctggggtaacccgggtaggcagtctggaggagagggcttgagctcgtgttgaccaatggataagagttctacaggcaagcacaaggaagggaggacaattgaaagagggacagcaggaccagaggcatggaggtgcactgtgcatggtgttattgtgaagaagaggtggaaaggagagcatccaggtggcccccatgcaccaggggctgggacagtttcaaggcaattgctgaaatctcacgatagtcctgagagtgggtgttttgcatgtgacgaccatgaagctcagaaaggtaaacctatgggctgatgtcccccagccggactcttgagccctgggtgtctgattccaaggccacactcctcctattgcacaggtgtgctttcaaccagacactgccttcccaactccccctggagggaaggcttgagcgctctggtttacacagggcccgctggatttctgtcaatagggaacgtgccgttgaagttgtaccagacctgggagagcctgcagcctcgcctgcaagcacagcctccaattacgccagtgcatctcctgctcatcaattccccttggtggagtagggccatgtgttctttgtttggatctaaatcctgctgctctattgattactataattcagccctaattggacttctgcaaagcacaggcacagatgacagcaggcctccaggcagcgcagcatccattattaatatgatggtgttggcctttcccctgcactctgccttcacctcgaggagtctggaaaacagacctcccgagcaacgtgccttccctgtgaagtcatctcctcaaaatatttgtttcctcttggagaagaggtgtgcaaaccgcacagctagcaaacaatgctttaattgcctttctgccagcccagggaaacagtctatgagcccctccttccaagttggggaggacactcagaccccctcgcaaggaagggactgacctttgtgagtagccaggctgcaggagagctgcaggcagactcgggggccagcctaaattcagagaagccagtgaggcagagaccagaatttgtacctggctgcccatgagaatggcccaagcagaagggtcacattgggccaagcactggagatggccaagtggcagcagagagtggagctgtgttccgtgggctcaagcagaacagattctcattattggaacaggcctaggtagccttgctacctaacaagaacttgggcacaagtgaagagtttcatagcctgctgaggagtgaaatgtcagcacatttgttcagctgaccgcagtgagcagagcgcccaggtggcagctctggttagcggactctggcaaatggtatgcccttccaacatgggattgagtatttgtaggatgtcagagatgggaagagctatgcaatcgtcttggccagccactctgtttatagatgggcaaggtaaagctgagatcagaaaaggaagctacctggggtcatgcttttccattctccagacatttggtctccttccctaatcgggggaaagtcaggtgaccaccacggatctggtcagacagggcccagggcagctatatgagctgctcagattctgagaggacaggtcagggctgggtgtagactgagccaagcacctagcctggaggttgatttttctaaagccaagtcactgactctttgtgaacagtggcaggcagtcaaagtccacagtgcacccacacatcacttagatcattccacaaaccttacttgtgggattagtctggcgggctgtgggataactccaggcatggctgacaaaaaccctgccctcctgctgcttatgggaagacagactgtaaacaagtcagcaaacatacagacaagggcttcaggtcacccaaaggctggaaagcaatggcactgcacggggaacatgaggaggagtggccggaggatgagctttgcccatcattaacagtgacatttccattccctgggctgccccctgctgcctaaggggctcactgcaggggcctgcacttggcccttattctgcaagttgttctttgtgggagaatggagttgagatcaggcatgtcctgcagcagtctccacccctatctagccagccacaggagtctaccattccctctcctgctctgcaagtcctagagtttctcttgcagtggacacaggtgttccttaggagcacaggccatgccaggtgtttctgcctgtccttagtgctttaggaacaccctatgagtgaaaacatggtcatagggaaggaacacagtgctgggtggagatggagactgacagctttgtctacccagctctacaaaacgctgggaatagctatccctgggaaccttaccagggggctgggagctggtgcattccctaccagaacaggcagcctcattagctcccatctgttcacacccaccccccaccaggagacaggactgctgtctcctacatctacacggctgggcccctggctgctgcagtgggacctggtgggagccgatgtcttctttgcgcctttctcctcttatacgtctctgtcccctctccttctggagaagaaggctgccaggacctgtgatcacagccaaggggtcagtcccaatctcagggcaaaaatgtgaggacaggcaggagtagccctccttcctggggagcataggtggggtggcatgcatgtaaaatacatgacccttgcctgtctcttccgcatgtctgcaccttgctttcagtcaacttccttgtgtatctttgcactgtgatcccaactgttatgttagtatgaaatctcaatcacttgtggagaagatgagcaactgcctccttctagttgtgctttgttggggaggaacagagctgaggcctgagggagagcagggaaagaagtaagggccttctgccagtctcatggcacctgaaacaagcaccctcactctaccaccagccactcctgccgcctgctccatcatctttccattcaccgttgaaagcctcagtcctccctgtgttttatttgcctctgtgttttatttgcctctgtgtgccttgaaaaacagagcagtccgtgtactactgagtgactgtgaagatcagtgagggtaggtaaagcccaaaggacaatgctggcaggtgagtgctggtcaaggtggccaactcccctgtattagtccattttcacactgctaattaaagacatacccaaaactgggcaacttacaaaagaacaaggtttaatggacttacagttccacatggctggggaggcctcacaatcatggcagaaggtgaaaggcacatctcacatggcagcagacaagagaagagaacttgtgcagggaaactcacctttttaaaattatttatttatttttttgagacagagtctcactctgtctcccaggttggagtgcagtggtgccatctcggcttactgcaagctccacctcccgggttcatgccattctcctgcctcagtctcctgaatagctggaactacaggcacccaccaccatgccctgctaattttttgtattttagtagagacggggtttcactgtgttagccaggatggtctcgatcccctgacctcgtgatccacccatcttggcctcccaaagtgctgggattacaggtgtgagccaccgcacctggccggaaactcacctttttaaaaccatcagatctcatgagacttattcactataaggagagcagcacgggaaagacctgcccccatgattcaattacctcccaccaggtcccttccacaacacatggaaattcaagatgagatttgggtggggacacagccaaaccatatcattccatctctggcccctcccaaatctcatgtcctcacatttcaaatccaatcatgccttcccaacagtcccccaaagtcttaattcatttcagcattaactcaaaagtccatagcccaaagtcttatctgagacaaggcaagtcccttctgcctgtgagcctgtaaaatcaaaagcaatttagttacttcctagatataatgagggtacaggcattgggtaaagacagccattccaaatgggataaatttgccaaaagaaaggctcaggccccatgcaagtctgaaatctagtggggcagtcaaatcttaaagctccaaaatgatctcttttgactccatgtctcacatccaggtcatgctgatgcaagaggtgggttcccatggtcttaggcagctcttcctttgtagctttgtagggcacagcctctcacctggcggctttcacaggctgctgttgagtgtctgcagcttttccaggcgaatggtgtgagctgtcactggatctaccattctggggtttggaggacagtggccctcttctcagagccccactaagcagtgccccagtagggactctgtctgggggctctgaccccacatttctcttccacactgccctagcagaagttctctatgagggcctcacccctacagcaaacttctgcctggatatccagatgtttttatacatcctctgaaatcaagggagaggttcccaaacctcaattcttgacttctgtgtacccacaggctcaacaccaaccacatggaagctgctaaggcttggggcttgcactcactgaagccatggcctgagctgtaccttggccccttttcgtcacaactggagcagctgggacggagggcaccaagtccctagactgcacacagcatggggaccctgtgcccaacccactaaaccagcttttcctcctacaccttcacctctggacctgtgatgggaggggctgccacaaaagtctctgacataccctggagacattttccccattgtcttggtgattaacatttggcaaactgttatgtatgcaaatttctgcagccagcttgaatgtctcctcagaaaatgggtttttcttttctactgcatcgtcaagctgcaaattttctgaaccgtttcactgtttcccttttaaaactgaatgcttttaacagcacctaagtcacctcttgaatgctttgatgcttagaaatttcttcctccagataccctaaatcttctctctcaggttcaaagtcccacaaatctctagggcagaggcaaaatgctgcaagtctctgctaaaacataacaagagtcacctttgctccaatttccaacaagttcctcatctccatctgagaccacctcagcctggaccttattgttcatatcactaccagcattttttgtcaaagccatgcaagtctctaggaagttccaaactttcccacattttcctgtcttcatctgagtcctccaaactgtttcaacctctgcctgttacccagttccaaagccaattccacatttttgggtatcttttcagcaatgccccattctactggtatgaatttactgtattagtctgttttcatgctgctgataaagacatacttgagactgggcaatttacaaaagaaaaaggtttaatggacttacagttccacatggctgaggaggcctcacaatcatggtggagggtgaaagacacatctcacattgtagcagacaagagaagagagcttgtgcagggaaactttttaaaacaatcaggtctcttgagaatcattcactatcacgagaacagcatgggaaagacctccccgcatgattcatttacctcccaccagatccctcctacaacacatgggaattcaagatgagatttgaaggaggacacagccaaaccatatcatccactgctatagcaagcacagaataaaaagcttttgtttatttccacagtcctggttcatccctgccctgctcctcacctagaaagatgagccctagaacaatgcccattctttctcttgcctgccatgcaattctcacctcagcaggtaagtgggagtccccagtggtgccagacctcctagatgagccatctggagatggacatgcaaccttctgtggacacactgtagagtgctgcatggcctgaaaccccctgcctggggagggccaggttagaatgcaggacataggaaaaggaagagggtggcaagaagaggaggggcagaacttgagtttgaaaggcccaggcgtgacacaggggtggcatctaacccaggccttgaaggatgaattagaaaaaactaaggaaggtttggggccagtgggagtgaggcataagacagaccaaaagaaatgcacagaggcggaaaattctgaaggaaacatgactatttgtagctcagagctattcctgcttccctgtgggaccctgaatgccggtagttcaaaagcactttccaacgaatgcagattaaaaagacttaaacctctgtttcccttttctccatatacataaaatgataaacacccctgggacggctaggatttatataggcagattttttgaaagtttgtcttatatatctggactatggcttataaatcaaatttggttctctttgctggagagtaaattatttatccaaggcagagcaccaggcgatagaaggagaggcacagagaagacactgttttccagaagtcatttatattccccaagatgaggaagtgtcgggggtggaagtttctgagttacagattctggcgttccttcttgattcgtgtgctctctgctggtagccatggactcctgaaattggctttctgttgaagacatcatttgtggaattcaaatcagtgttttgcatttgggtccagcaccctgggtggatggctgcctgaattgagcagtgaacatattcagctggggaataaggggaccatcctgcgagtccatcaggctgcactgagttcagctccaccatcactctccctgggatatcaagcacacttagaacctcgctgggcttcagtctccttatagctggagccagagagtaacatctgccccttggggtctttgcagggttgaatgtgactgcatcgcacacagagcaagtaataataataagggagctcaaccccaatgccctacctaagagtcatcccagtgggagttgtccaaatgtgctccaggaggcttccctgctccagaaccccaagggaggtctgtgaggaggtgaaaaatgtctacacttttagtcaaatctcttaaggagaaaaaccactggttttatttcttttctctttttgtcattacaatttccaaggatcgagtgtgagtgttcatgtatgcagggccacgatgccatgctgggctggacccaggaggtgcctctctttctctgttatcaccaagcaccacacagaaatgtccttccaccagacaggcactcaggaagcatgggctgatagatacactttaggaatccagcaaagaactgtgagatctacactctaaaaatagaactatctgctctcaaaatttactatgggatgacatcctgggagctacccatcactgtccccataaacctagtgccccaaggtcccatgaacttcaggtcaccagaattatttttctctgaatttgacatttaggagaaagtaacggctgatagggagcagtgctgggttcgcaaggcctggaacatccctcctgggggctgcctctgccccacagacacctcccaggtggtcaccagcttctgcagctgcctcttgcatggggtggagccatgctcagagctaaaatactcagtcgctgctggtcttcaaaatccaaggacagttccgttttatttaacaaactagatttcctgaggcagaaaggtagacttgtcttttccagaaataatgctgaaagtgttaaaataaaaataattatttggaagcccaagttgattccaaaattaatctaaaataattcattccctgagcattttggtttattgaggttttacagcctcatgcaccaagtatttccatagtgccactgtgggcttagcactcccaccacaacaccaggcaggcagggcgggcctgcggaggagcatttgctatgtgctcagaggtctggaagggtggctgtgacagtgtggaacccagggacagagctgtgcccaggatgaggaaatgcagaagcaccttccagctgcggaagagcaaggggaaagcggagggttgagctgcatcccccactaaagacatgtggaagtcctcaccccagtgcctcctgatgtgatctgatttggaacagagtctttacagagataagttaaaatgaagtcattagggtgggccctagtccaatatccatataaaaaggagaaacgtggacccacagatagacacatacagagggaagagaacacaaggacacgcaagggaggaaggccatgggaagacaacacaaggacatgcagggggaggacagccacagggagatgatgtgaggactcacagtgggaggatggccatgggaagatgacatgaggacacgcagggggcagatggccatgggaagaggacatgaggacatgcagggggagcgcaggcacaggaagaaggcacgaggacatgcaggggatgatggccatgggaagatgacgtgaggacacacggggagaacaaccatgtgaagaggacatgaggacatgtgggggaagatggccaaaggaatatgatatgaggacacacggggaagatggccacgggaagatgatgtgaggatacatgggggaggacagccacaggaagaggacatgagaacacacacagggacgatggccacaggaagaggatataaagacatggagggggaggatggccacgggaagaccacgtgaagacatgcaggaggagacagccatgtgaagacgatttgaagacatgcaggggagatggccacaggaagatgatgtgaggacacacgggggtgggggcatggccatgggaagaccacatgaggacacacaaggggaggatgtctgcgggaagatgacataaggacacacagggggaggacatccatgggaagatgacatgagggcacgtggcggaggacgtccatgggaagatgacatgaggacacgcaggcagaggacgtccatgggaagatgacatgaggacacacagaggaaggacgtccgtgggaagatgacatgaggacatgcagggggaggacatccatgggaagatgatgtcaagatatgcagggggaggattgccaaaggaagatatgatgtgaggccctgcagggggaagatgtccatgagaagaccacgtgaggaaaaacggggaacacgtccatgggaagacaatgtgatgacatgcagtgggaggacagccagggaagatgatgttagaacacacacagggacgatggccacaggaagaggacatgaagacccacagcgggaagacggccatgagaagaccatgtgaggacgtgcagggggaggacagccacgtgaagacgatttgaagacacatatggggagatggccatgggaagatatgtgaggacacgcagcagtggggatggccatgggaagaccacatgaggacacacagtgggaggacatccacgggaagatgacgtgagaacacacaggggatgacatccatgggaagatgatgtaaagacacacagggggaggacgtccatgggaagatgatgtgaagacatgcgttgggggatggccacaggaagactacatgaggccacacagggggaagacgtccatgagaagatcacgtgaggaaatagagggggagacagtcatggaaagatgatgtgagaacacgcaaggggatgacttccatgggaagagatgatgtaaagacacacgggggaggaagtccatgggaagatgatgtgaagacatgcagggccacaggaagatgacatgaggccactcagggggaaggcgtccatgagaagaccacatgaggaaatagagggggagatggccatgggaaggtgatgtgaggacaagcaggaggaggatgtccttgggaagatgatgtgaagacacacaggggatggccctgtgacccagaaatgccaaggactgccggcaacaccagaagctgtaagaggcaaggagggattctcccctagagccagcagagagatggccaaccttttgaattcagacttctacctccaggcctgggagaccatctgttacagctgttttgggccaccagtatttgccactttgttatgacaggctcaggaaactaacgcaaggagcatcttagcttttgttcctccagaagctcacccagagaacaggatgcacacacaggtagatttgaggggcaggactccaggaaacactggtggaggagaaggggaatgaggcaaggaagggatggtagcaggcagacgctgtgctgtccagccaggggcctctgcagacaatgacacttaatgcccatggggaaactgggagttagtgtagaacatgcactgcagctatctgactcaatgttagggagctagggtatttatacaccaatgtccatgagctgagggctgctgttaccagggcagccctgataaaaataactgggaaagtttatttttcgtattgttttcctttattccttcatttacaggcacagctacttaaagaaaccagggactatgccagaacttcttgacctctggccaggtaccagaggaagataaaacctcacaaactggtgcaaactggaacagaggatccctggttgcctttagatcattaagatattatggtgctaaaattccctcccttaaaaaaaactctgccatcttttatacatgtgatgtatgaagatgtatgtgtatgaattgcacctgcccatctggaatctcgcatgctcaagttcctctcccagcctgtaaccagtctttaaaaaccccatgtgtcctaggcttcagggagaagatgcatttagaatatcagcttgccatccccatttctagccagtgaacagaaactggttgccttttccaattagactttttttaaatgaccaatacaaagtggaaaaagaactctgtttactggtaacactactgcttgaggataggggtggtgttaattctctggcacttggtgtaggtagcaaacttgctctggagaccagagaaagccctaggaagggcctgggctggcaggaaagccctcaggcagggcctgggaggcagtagggacaagaggcatggatggacactgacagtgctgcttcagggaacattgggaagggggagagaaaaaggcaggaaagttacctgtgaagccagactgccaaacttggatgtcaggctagagtctggacttcattccttagacagtagggaggtgataaaggtttctgagtggaggaatgaccagattagagctcagcttttggaaaatgaatttggcagggagaagaaaaaacagaacactgacagttaattgtgcttgcctgacagtgctcagtgagaaagacaggactaaagtgacatggcaaggaggagaaggcagtaggaaatgctggctaactgccccataagccacagagtcctggttcatagactgtcaaggaaactgagggtcagggtgtggagaagggtggctccagggcacctgggataagcaggtttgggagaagaactgtccaccatatccttcactccctgtcctgagtccacatttcagaccaaatgagaaacataagccactgggaattgagcagatggcttttccaaagcttccacagttttcattccatccaaatcaaacgtggattggaagccacagggtttgtaaatgccactgtgccatttgaagctaggatctcgtttgccaacttgcagcctgcacttcagatgcttcaaaagagagggttatccacactgacttataaataaatgaagaaactaaataatgcattccatcctaatatggctctcatttccttgatgattatgtaaaaaatcactaacctaaattgcccaatagatagaagaccctcaaaaggaaacccgagggagaactggcctttatccattccatataaatcacagagatgctgcttttcctcacatctgaggagaggggcctccaggctggggctgcacagggcggtagatgcttcctcctcctcagcttcctgactgcctgagaagagtcagcctctgtgtaggggctggatctgtcagttcctgggttaccaacaagcccggtgctcagggagggagtagggacagtgggttctcagaagcagttctgagagaatcccgttgtggacttagcaggctcaggcaaaagagaggattaactctgcttgggccaaaccatgcgatgcatctgcttgcattgggaggaagatggtcaccaggagctggcaggactgttgttcagaaagcaatgccccaaagatgcatttactcattctactgtcaaataaaggaagggcaggaagtttttcagagggaagggagcctgagggtcctcacttcccaaatgcctggcatttactcatttcatcttcacagtgagtcctactgccaccactgtagatgagaaaactgagtttcagaggtggagcaagcagccaacataacacatttgttaaacagctgggttgggacctcatctctggactcctacgcacaccctccatccacactgtaagctgctggggaggaggttaacagcacttcccactctgaagttgcctttaaaaaaattatggagggaggttccaagatggctgaataggaacagctcccgtctacggctcccagcatgagcgatgcagaagatgggtgatttccgcatttccaactgaggtacagggttcatctcactggggcttgtcagacagtgggtgcagcccatgaagcacaagccaaagcagggcgggacaccacctcacctgggaagtgcaaggggtcagggaattccctttgctagccaagggaagctgtgaccaatggtacctggaaaattgggacactcccaccctaatactgtgcttttccaatggtcttagcaaacagcacaccaggagattatatcccatgcatggttcagagggtcccatgcccgtggagcctcactcactgctagcacagcagtctaagatcgaactgcaaggcagcagcaaggctggggaaggggcgtctaccattgctgaggcttgagtaggtaaacaaagtggccaggaagctcgaaatgggtggagctcacagcagctcaaggaggcctgcctgcctttgtagattccacctctgggggcaggtcatagctgaagaaaaggcaacagaaacttctgcagactaaacgtccctgtctgacagctttgaagagagtagtggtcctcccagcacagagtttgagatatgagaatggacagtctgcctcctcaagtgggtccctgacccccgagtagcctaactgggaggcacctcccagtaggggccaactgacacctcatacagccaggtgcccctctgggatgacgcttccagaggaatgatcaggcagcaacatttgccattctgcaatatttgctgttgttctgcagcctctgctggtgacacccaggtaaacagggtctggagtggacctccagcaaactccaacagacctgcagatgagggtcctgactgttagaaggaaaactaacaaacagaaaggacatccacaccaaaaccccatctgtacatcaccatcatcaaagaccaaaggtagataaaaccacaaagatggagagaaaccagagaagaaaagctgaaaattctaaaaatcagagcactcttctcctccaaaggaatgcagctcctcaccagcaatggaacaaagctgaatggagaatgactttgacgagttgagagaagaaggcttcagacgattggtaataacaaacttctctgagctaaaggaggatgtttgaacccattgcaaagaagctaaacaccttgaaaaaagattagacaaacggctaactagaatagacagtgtagagaagatcttaaatgacctgatggagctgaaaaccacggcacaagaaccacatgatgcatgcacaagcttcagtagatgatacgaccaagtggaagaaagggtatcagtgattgaagatcaaatgaatgaaatgaagcaggaagagaagtttagagaaaaaaaaaagtaaaaagaaatgagcaaagcctccaagaaatacgggactatgtgaaaagaccaaatctacatcagattggtgtacctgaaagtgacagggagaaaggaaccaagttggaaaacactattcaggatattatccaggagaacttccccaacctagtgaggcaggccaacattcacattcaggaaatacagagaatgccacaaagatactacttgagaagagcaactccaagacacataattgtcagtcaccaaagttgaaatgaaggaaaaaatattaagggcagccagagagaaaggtcgggttacccacaaagggaagcccatcagactaacagcggatctctcggcagaaactctacaagccagaagacagtgggggccaatatgcaacattcttaaagaaaagaattttcaacccagaatttcatatccagcgaagctaagcttcataagtgagggagaaataaaatcctttacagacgacatgagcaaatgctgagagattttgtcacccccaggcctgccctaaaagagctcctgaaggaagcactaaacatggaaaggaacaaccagtaccagccactgcaaaaacatgacaaattgtaaagaccattaatgctaggaagaaactaacaagcaaaattaccagctaacatcataatgacaggatcaaattcacacataacaatattaaccttaaatgtaaatgggctaaatgccccaattaaaagacacagactggcaaattggataaagagtcaagacccatcagtgtgccatattcaggagacccatctcaagtgtggagacacacataggctcaaaataaagggatggaggaagatctaccaagcaaatggaaaacaaaaaaaagcagaggttgcaatcctagtctctgataaaacagactttaaaccaacaaagatcaaagaggacaaagaaggccattacataatggtaaagggatcaattcaacaaaaagagctaactatcctaaatatatatgcacccaatacaggagcacccagattcataaagcaaggccctagagacctagaaagagacttagactcccacacaataataatgggagactttaacaccccactgtcaacattagacagatcaacaatacagaaagttaacaaggatatccaggaattgaactcagctctgaaccaagatgacctagtagacatctacagaactctccaccccaaatcaacagaatatacattcttctcagcaccatatcacacttattccaaaactgacaacatagttggaagaactcctcagcaaatgtaaaagaacagaaattataacaaactgtctctcagaccacagtgcaatcaaactagaactcaggattaagaaactcactcaaaaccactcaaccacatggaaactgaacaacttgttcctgaatgactactgggtacataacataatgaaggcagaaataaagatgttctttaaaccaatgagaacaaagacacatcataccagaatctctgggacacatttaaagcagtgtgtagagggaaatttatagcactaaatgcccacaagagaaagcaggaaagatctaaaatgaataccctaacatcacaattaaaagaactagagaagcaagagcaaacacattaaaatctagcagaaggcaagaaataactaagatcagagcagaactgaaggagatagagacacaaaaaaaagcccttcaaaaaatcaatgaatccaggagatggtttttgaaaagatcaacaaaattgatagacggctagcaagactaatacagaagaaaagagagaagaatcaaatagatgcaataaaaaatgataaaggggatatcaccaccaatcccacagaaatacaaactaccatcagagaatactataaacacctctatgcccataaactagaaaatctagaagaaatggataaattcctggacacatatactctcccaagactaaaccaggaagaacttgaatccccgaatagaccaataacagactctgaaattgaggcaatacttgagagcctaccaaccaaaaaaggtccaggaccagatggattcacagtcaaattctaccagaggtacaaagaggagttggtaccattctgtctgaaactattccgatcaatagaaaaagagggactcctccctaactcattttatgaggccagcatcatcctgataccaaagctgggcagagacacaacaaaaaaagagaattttagaccaatatccctgatgaacattgatgcaaaaatcctcaataaaatactggcaaagagaatccagcagcacatcaaaaagcttatccaccacgatcaagtcggcttcatccctgggatgcaaggctggttcaacataggcaaatcaataaaagtaatccgtcatagaaacacaaccaagtacaaaaaccacatgattatctcaacagatgcagaaaaggcctttgacaaaattcaacagcacttcatgctgaaaactctcaataacctaggtattgatgggctgtatctcaaaataacaagagccacttatgacaaaccgacagccaatatcatactgaatgggcaataactggaagtattccctttgaaaacaggcataagacagggatgccctctctcatcactcctattcaacatagtgttggaagttctggccagggcaatcagacaggagaaagaaataaagggtattcaattaggaaaagaggaagccaaattgtccctgtttgcagatgacatgattgtatatttagaaaactccattgtctcagcccaaaatctccttaagctgataagcaacttcagcaaagtctcaggatacaaaatcaatgtgcaaaaattacaagcattctcatacaccaataacagacaaacagagagccaaatcatgagtgaactcccattcgcaattgcttcaaagagaataaaatacctaggaatccaacttacaagggatgtgaaggacttcttcaaggcgaactacaaaccactgctcaatgaaataaaaaaaggacacaaacaaatggaagaacaatccatgctcgtggataggaagaataaatattgtgaaaacggccatactgcccaaggtaatttatagattcaatgccatccctatcaagctaccaatgcctttcttcacagaattggaaaaaactaatttaaagttcatatggaaccaaaaaagagaccgtattgccaagacaatcctaagccaaaagaacaaagctggaggcatcacactacccgacttcaaactatactacaaggctacagtaaccaaaacagcatggtactggtaccaaaacagacatatagaccaatggaacagaacagagccctcagaaacaataccacacatctacaaccatctgaattttgacaaacctgacaaaaacaagaaatggggaaaggattccctatttaataaatggtgctgggaaaactggctagccatatgtagaaagctgaaactggatcccttccttacaccttatacaaaaattaattcaaggtggattaaacacttaaatgttagacctaaaaccataaaaatcctagaagaaaacctaggcaataccattcaggacataggcatgggcaaggacttcatgactaaaacaccaaaagcaatagcaacaaaaccaaaattgacaaatgggatctaattaaactaaagagcttccacacagcaaaagaaactaccatcagagtgaacagacaacctacagaatgggagaaaatttttgcaatctacccatctgacaaagggctaatatccagaatctacaaagaacttaaacaaatttacaagagaaaatcaaacaaccccatcaaaaagtgggcaaaggatatgaacagacacttatcaaaagaatatatttatgcagccaaaagacacatgaaaaaatgctcatcatcactggacatcagagaaatgcaaatcaaaaccacagtgagataccatctcacaccagttaacaatggtgatcattaaaaagtcaggaaacaacaggtgctggagaggatgtggagaaatgggaacacttttacactgttggtgggagtgtaaactagttcgaccattgtggaagacagtgtggcaattcctcaaggatctagaactagaaataccatttgacccagccatcccattactgggtatatacccaagggattataaatcatgctgctataaagacacatgcacgtgtatgtttattgtggtactattcacaatagcaaagacttggaaccaacccaaatgtccatcaatgatagactgcattaagaaaatgtcgcacatatacaccaggaatactatgcagccataaaaaatgatgagttcatgtccttttgtagggtcatggatgaagctgaaaaccattattctcagcaaactatcacaaggacagaaaaccaaacactgcatgttctcactcataggtgggaattgaacaatgagaacacttggacacagggtggggaacatcacacaccggagcctgtcatggggtggggggagaggggagggctagcattaggagatataccttatgtaaatgacgagttaatgggtgcagcacaccaacatggcacatgtatacatatgtaatagacctgaactttgtgcacatttaccctagaacttaaagtataataaaaaaaaaaaaaagctgaagatgattaaaaatgataacaaaataggcaaaaaaaattatgatagaaagaaaatctgacgtaattgactccatctcacttctaccaggctgaattgcttttgctcattcttgtgtggaggccataatagtccttttcttgattttctccctgccttgttcaaaggttgaaactatatttgtaaagactgatcaaaggccagaaggtcagaattctggtagaggcctgaactttgctaaagaatgggcacaattaaacaataatcagccattgttggctcagcttaattttactgccccagagtcacataacagaggtcacaagatttgtaacttccccagctgctcctacaagtaacatcactattgtgaggcctaaaggactggtctttgagatatttttctgatttagcattttgctaagagttaccacctgggcctgtgaccaacaccaatggatagactcaactggccctgtgacccttgggtaagaaatgactcagccacagtttccacacctcagtgactttatccccagctaatcaattgtttcagtttcccagtcccctccccagcaaagaacccataaaaaccctagcctctgaattctcagggaagtggatttgagaatctctcccatctccttgtgtgccttccctgtgattattaaactctttctctgctgcaacacctgctgtctcagtgtattggcttttctgagcaattgacaagaagcacccatggggctctgacaacatcatggtagcagcctgctccttcaactgctattgagtggaaaggaaaccctggtgtccctcccccttccccaggaaggactgggcactagcccctgagggttgatggtggatcattattcattcattaattcattcattctcttatcagcaccttccaatatccagtcaacaaacaagctgagaaggcccaggtgatggaaacctcctcacagaggctgaggaagggagatggatgagccccaaagcacactaccaggttacagaataagtgctgtggcaccaaaacaacatggtggcatggtcacaagagtgaaccccacactcaaagccctgggctggagtccagccctcaccaactacaggactcagtttcctcatctataagatgggggtgataaaaatgcccattttatggagtgtggtgggaggactagaggagatgtgaaggtgtttagaaaatctctggcatgtggtggctgtctcatgagggactagccatggtcactaagtatcactgtcatgagatgagaacatcttcttgggtttgcagatctgctgtgagggcactggcctgggtttgccacatacccctctaggtattcacaggcatttaaatgcctttagccttcacagtgacggtcaccctttaagaaggacacacattagcatctgtctttgacagaggaagaaccagtgcactgacgggctaagtgacttgtacaggacacagtgctaacacaggggtgagcctgaatccatcccagacagtggcctccagcaactgctttcccaaccactgcaattccactgccaaagaaaggaagggcaggaagtctttcagaggggagggagcctgaaagtcctcacctaccgaatgcctggcatttactcatttcatattctcagtaagtcctactgccctcactgtaggtgaggaagctgaggttcataggtgaagcaagcagccaaagtcacatatctgttaaacagctgggttgggacctcatctctggactcccctgcacaccctcagtccacacttcaagccacattctccatctagcctcgccaacaggcctcaggacctacagctatgaccatcctgttcacagtatttgctttgttttgattttaatgcttctctgaaaggatgatgttcacctttcttgacctcagagaagccagagaggagatagtcatctccgtggatggcaaaggcccatgtgttgtgagtggcagccaccccctagctggaggtcaggtccacatagaatccccattgtaagcacaccacagtgatatggctacctgagtaaatcctgtggggaagtctgtggatgcaaagactcacctgtaaagcaaacggtcctgcttccattcaccatgttcatcttctgataatgtaagaagcacatcgtatgtgtgatgtgcgtggtgactcacaccataacagtggctaccacttattgagaatttacaaatgtcagcagctatcctaataatgtcacatgttatctcatttatctgggacaacagctctatcaggtaagttctgatgttatcatcattttccaggtgctacctcaatcgagaaggcagggcagggacactccaagtgtgctccctggatcgatagcatcagtgtcacctaggaatattgcagaaaggcacattcttagtctcagatcaggtctgttgtatcagagcctctgggcagcaccccgccatctgtgctttcataagccctccaagggattcttttttttatgttagttatttattttagattcagggggtacgtgtgcaggtttgttacacgagtatattgcattatgacgaggtttgggcttctaatgatcccaccacccaagtggtgaacacagtgctgatacatagtttttccatacttgcccccctccttccctcctcggttttgaaatcccgagggtttattgctccagtctttgtgtccatgtgtatccaatatttagctcacttttttttttagatggagtcttgctctgtcgcccaggctggagtgcagtggcgcagtctcggctcactgcaacttctaccttccaggttcaagcaattctcttgcctcagcctcccaagtagcagagattacaggtgcccaccaccacgcccagctaatttttgtatttttagtagagacagggtttcaccatgttggccaggctgctcttgaactcctgacctcaggtgatccacctgcctcggcctcccaaagttctggcattacaggcgtgtgccaccatgcccagccccgtttagctcacttttaagtgagaacatgcagcattcagttttctatttctgcatttcttcactttaggataatggcctctagctgcatctatgttgctacaaaggggttttgttcatttttaatagctacacctgcaggtgagtatgatgtgttaaagtttgagatcaaccagactagggataacaaaagacctcaagatctcaatggcttacatcaggggctgtcaaactatggccaaaggccaaacccagcccactgctagtttttgtaaatgaagtcttattggaacacagccatgtccattggtttgcagtgctgcctgtgactgctttgcagatacagaggcagagttgggtaagtttgacagagaccacatgacctacaaaccctaaaatattttctctctggtcttttttcaaccctggcttcgagcaacaaaggtcatgtctcggatccactgcaggtctatggaggccagttgtggctctacattctgtctctctttctgtcccaggctgcagtggcaggctctgcctggggctttgtagcacattgggctaggaaaaaggacacagggagacacatgcaacaattaaagcttctgctctgaaataacacacatcattgggtcatattccattagcccaagcctaatgtccttggaatattaaagaataatccaacctccacactcaatccatctaatccgacaatccagccctgtcgtcgggtcacaaatacccagcttattctccttccacatgcagaacccatacccctctcccaagagaggtggcctagctagtcataacatcaggctcaaggcccatctcaggactgtctctgtggggcagagtgatctctctgacctcctgaacaaagataacatgcaccatggaacagagacagggtggccacagggacattcccagctggatcaggtgggggcggggatgggagcagtctcagccctacgggtggatattgataccactccataggaaggcccacagtaccttgtcttctgtgccccttaaactatagcctggcattatcctaagaaaattaaggcagaaatagaaaaccaaataccgcacgttctcacttaaaaatagaagttaaatgttgggtacacatgaacacaaagataggaaaaataaacttcagggattccaaaatgggggagagagggaggggttgaaaaactacttattgggtactatgtttgctacttaagcaatgggaccgttagaagctcaaacctcagcatcacgcaacatatccatgtaacaaagcacctcggcatcacatgatatacccaagtaacaaacctgcactcagcatcacacaatatactcaagtaagaaacttgcactcagcattacacaatatacccaagtaacaaacctgcacctcagcgccacagaatatacccaagtaacaaacccgcacctcagcatcacacaatatacccaagtaacaaacccgcactcagcatcacacaatatacccaagtaaaaaacctgcatctcatcatcacacaatatagccaagtaaaaaacctgcacctctgcatcacacaatacactcaagtaacaaacatgcacgtcatcaccagcaaatacccaagtaacaaacctgcactcagcaccatgcaatatacccaagtaacaaacctgcactcagcatcacacagtatacccaagtaacaaacctgcactcagcatcacacagtatacccaagtaacaaacctgcacctcagcatcacagtatacccaagtaacaaacctgtacctcatcatcatacagtatatccatgtaacaaacctgcacctcagcgtcacccaatgtacccaagtaacaaacctgcacctcagtgtcacacaatgtacccaagtaacaaacctgcacatgcatcccttgaatctcaaataaaaataaggtaaaatgcagattctcagacaccaaaaacaaaatctatggcacaagaggttttctctgttctattattcttgtccccctctaatgagggtggcagaaaataagctctacctgtggaaacagttctgtttcctcagcctgcttcctgaccagatgaggccgggggctcaagggttgttttaagccccagacaggctttggctgtatttgcccaggtctgtgattcttttgcagcagaattctcttaaaacatatttgtttcttatttatttgattccaggcagatccaggtagcattgaccacactcatgtccaattctcctgacttaattgtgggtgccctgattgcatctggcttctatgggacagtcactccctagtcttttgtcctggagccataatggggaaactgaggctcagaaagatgaagtaaactttctctggcttcagctctgggattgaacccagctctctaggtctccagagctgtctataccacctctgcccatcatccaaaatgtccagacttatactcctattctgtgtcaaataattccacagccttaataagcaattgtcagaggcttgaagaaaactgaattagatgtccctaagaactgcagaactctcagaacttaaagactctgttcagacccctgccctaagatgcttgaccaaactccagcatgggtcctagcaggatgaggccatgtccccaggatgaccccagcccccgattaaaatgcctgcctgagaaagatcaacattgccaggaaagtttacttttcattccaggccacacctgacctgggcctctgacctccctttcttaaagcatttactaaaatgagcttataattgtgaatgtatcttctgcaactcaggagcatccttgtggaggacccaagagctgttcctttgaaatgcagtcattaagaaggatagtgcctctgtctcccagcctctgtcagagaatggagccctaacttagatcactgcccactggcagacccgattggcctcaccgcatttaccccaaccaaccctctgaccattttcccttctctggctctgctgagcccccactcttcccacttcctccttctccctttaatacacccagctcacctctgcaggaatcagaatggggctctgctcttccccgcactggataaccactgttatccagtagttactggataactactgtggataactactgttatccagtagttactggataacatctgttttcaccactttaagtagtatccggctgtgtttatttttgacacccccttctcacccaatacttctttcacagacacccctttgctttctcccaaggctcaagtgtccttatcaaactttaaggaatgttaacatcactgggaggtgggagcatgcttgttaaaaacacatagctccaagcaccaatctctcgggatttcatttcatagagtgggtagagactgggaatcagcattttagcaaggaagactacctcctcagccccccaggggattctggtgcaaaggtaggcttgccactctttgaggaacattgccctatcaggtctgtaatttccacctgctaggggatgaataacgttctgtgagaaagtagcaagttcttccaaaggtgcttgcagacatgtgagaagaagcacttcattaatttgcaccccagtccttggaggtggcaccgtgacagttataattatccctcgattacttggagggatttaagtgttcttagagaacaaacttaggcacagaagttaagtgactgccaaatgcacccagcaggctggtggtgggaatcaggccatgaaggggcagaccaaggacacacaagtccccgcagaggccagacattagctacaaggtacaataaatcacctcctcttgtgcaccaacccagaaggagggaagaaagcagagaaggacaagacaaaaggaagaaaagagtcaactaatgttgtctcaatccacaggccatagaagtgcttcactgaatttcataaaacactgagttagttgccaatagtttcaaatcagatagctgcacataagaatgtaaatctcagcttctcaggaaaaatcagaggctctggaaacacacagagctaagggcagcaattcactttggaggcagcgtgcaacctcctgccactaaatgactgccatgctcattgacctgtgcaggccccagaggtgaccccggcccagtcagtggatcatacttcccgtcacagctaagcttggggagaggactagcgtttcctctcctcactgagtgtcaaataaatacctagcttggagggtctgcagagtggggctcctgtgatggacaagtgcttccagtgagtgtggaaagccctttatcttcttccaagagatctgtgcaaactccccctcctccagcagaaaaggcaatggtctggacatttcattgcaccttggaacaagtaaatcactttggactttcctaaaacctgctctgtcaccatcggccattgccaggccaaggaaacagagaagaatttgtggaagcaaaacagctccttgcgggtgagaaaaatcttacttaggtttttctggcagcagaagcagttgaacaaagagagacttctaagagaaaatgaaaagctttagaatgagtttatcgccaacaaagccagctcaagcttggggctttttcataatattttaaaattaagttaacattcatttaacactaaaacaggaatttaatgaagtctgaaaaataatccggcctttgaatgagatatctaaaattccattttaatatgcaaaacaatgtaagataattgtattcaagcaataattcaaaaacattttatcataattgcaagttcacacaaaaatatgaaggaaccactgtaatattctcaatatgaggaaatatgggggaactaaaaaagtaatggtctttaattcaaaaccaactaataaggcatatagataagtattagattactgtacgattttatctgcaacagttaaaccctggaacatggctgagaatcagtgaaaaccaaagtcatcctctgtaaccagccagatgcacagtcacttctggtcgcaattagccatgcttggacagtcacgttttctccttaagaaaccaaacagaattccagattctctctatcctgccacaggttccctgttcataacacattttttattcttgagtctattagctccagatgatatccagaaactcattttcaaaagcagcttttagaaatggcacaaaacggctgggcgcattggctcacacctgtaatcccagcactttgggaggctgaggtgggcagatcacttgaggtcaagagttcaagaccagcttggccaacatggtgaaaacacatctctactaaaaaaaaaaatacaaaaattagctgtgggtggtggcacaggactgtaatcccagctacttgggaggctgaggtgggagaattgcttgaatccaggaggcagaggttgccatgagccagggtcatgccactgcactctagcctgtgtgacagagcaagactctgtctcaaaaaaaaaaaaaaaaaaaaaaagcacaagacaatatggatattttcctgtaagtgaaatttataaacatgaagcccacaattatagagcaaagatagttgctttgcgtttcctaggatcaaatggaagcccctattcagaactaaatgggctggctgtggtggctcacacctgtaatttcatcactttgggaggctgagaagggagcattgcttgagttcaggagttcaagaccagcctgggcagcacagcaaaaccctgtctctacaaaaaaatacaataattagctaggagtggtgatgtatgcctgtagtcacaactactcgggaggctgaggcaggaggatcaattaagccccagaggtcaaggctgcagtgagctgtaatcacattattgcactccagcctgtgcaacagagtgagaccttgtctcaaaaaacaaaacagacaaataaagcataaacaatttaaaccaggaaatttcttctgatctattctgtgtgtatgaagcacctcctatctagaacatgggagtgatattgtacatatatgataaatccaataagatctctttggagtgaggggtgacatgagcataggagactggctttatgcattgcaaaattgtcaaatgctgtcttgggactccttgggttatagatgacataagcctacccaactcaacttaatcaaaaaaggaattaccggttcttgccactgaatagttgggtttggatgcagctggttgcaggagattcaacactgtcatcagaactctgcatctctccacatctcttcctggtgttggcttcattctcagacagtctgtctcttcatatagctttctgcaggctcacagttacattagccttgcagcaatctcaggaggaaaagtgtctcttaccctatggttctagcaaatattaaagagttggcttgttctgactggatcatcttgaattgaggagaaatccctaaacctactgtagtagccatccatggaaaagaagtgttctaattggagagaacaggtttatggactcactccaggatccttgggaaagaggtcttagccccacccaaatgtcatagattgcgcttggaggaaaggctaaccccctaagaaaaaatcatggtgctgttatcacaaaaagaagacaagaataatagacaagtaaaaatacccattgcttcctacacatgccctagaagacatttaatgtatgtgcagtgggcattcagagagagaaacagaagtgttataacacgtgcactgcctcacatgtaacaggaaaaggacaaggagagggaaggaatggaggggaagctgcccgcacacttggcttgagttcagtttctttggatcctctattttctcataaatcacagcccatttgacgataagaatcacctcttccagtacccaaccattgtggacctaagaaactaaagttacatcgatctatgctccattcatgattaattcattcaataaatactgatttagcaactactctgggcagagtcctcatcgatattccagagttagagtaatgacaatgagcacacaaaaatccttgtccttgtggagcttacagtcaagtcaatggacacagataacaaataggaaagaaaaaaattaacataaaggatgtcagagggtgataagtacttgggaaaaaaacaaggcaggaaagagaaaaggtgtgtcaagggtaaagagacattcttacagtaagattatgaagtctaaagaaagtgaaggagtacaccatatggctacttaagggaagagcattccaggcatagggaacagcctgtgcaaagccctgaggtagatctgtgcctagacgctttaagaagaccagtgtggcgtgagagtgagcagtaagtagatgaagtgagaatggtaacaaaaagtagagggtataggaccttagatattgtaagaatgctggtttttactctgagtacctgggaaacagttggattatttaaatagtagaggccataatatgacatctatttttaaaacatcaccctggaatggactacagagggaaagagcaaaaacagggagacatctgcaataatctaggttagagatgagacggtggctaaggaattttggccatacttggaaggtaaagctgacaagatttgctgaaagatttgatttgggctattctccaagagagtagtcaaggatgaccctgagaatgggtcatccatccatggagttgctgttcattggtgcagggaagaaaatagaagaaacttgtgagaaggtggtagaaggtaggagtttcatgttggacatgttgggtttgagatgttggttagacatctgagtgagtctggagagtaggtagctggtatacaattctacagttcaggaggcaagtctgagatagaaatgaccatttggaaatgaccatttttgtcgtgtgtataaggtatttaaagccatgagattaaaggcaatcactgagagagagaccgttaataagagaggatacgtataaagacagcctggggacgttccaattttagcaatcaaggaaaggaggagaaaatggcaaagggatctggaaagcagacccagtaacgtagaagaaaagctacaagagtctggcttcctggaagccaaatgaacaaaatgtttatggaggaaaaacttttcaaatactgcaaatatttaggaaatatttcagattgcaaataggccaagtgagatgaaggctgataattgacaatttcctggccaatgtgtaggtcattagcagtttcagtgtagctataagaacataagaactggagataaaaaatagcagcaattcttttgtagagttttgctgatatatcagctatttggaaaggtgacctgctggttcaccagcttcaaaaaaactctttaatttattgtctcatattaatgtatgatgaggagccagactctgttggagttatcctctgcatagcacttttcagaaagaataaaaatcacagaatgacaatgtaaatcatcaagaccaaggtgtttccaaccaatctcaaattaagataagcacgctgttcatatgaaataagccagaagttctctatttcattcttttttttttttcttgaaacagaatctcactctatcacccaggctggagagcagaggagcagctcactgcaacctccgccacccaagtagctgggattacaggtgccagctaccatgcccagtagagacagggtttcaccacattggccaggctggtctgtaactcctgacctcaagtgattcgccctcctcggcctcccaaagtgcttggattaaaggtgtgggccaccataccctgtctctctatgccattctatatatcaacacaaacatttaaaaatgttttattctttcttctttcttttcagtaatattttcagatttccggttccaggcatggtagaacctttctacagatagcaattacaaattctaggggaaaaaatatactagacctggccacttaagggaacttggaagcaaccagaagcaagcagaacctgaagagatttttcattgcaaataagagagtgcacagagagtacgacccatattcatacaactttgtcccttaggtgcaagctgaaaactgtagttatattgacttgagatgtcaaagaagggagtttgaaactgctggtgtggatgaaaaatgaaggggaaatcctttaaaggaagaagtcacagaggagggggagtcaccaaacctgtctataagctacgctccaatctagactcatccctaaactgcatgtgaatgatggagactttaggaatcaaaggaaataacaatagctggaaggctaaaatacagaccagatatgtcagcctcttttctgtgcatgggagccagcgtttggagcttgtatcctagcaagttaaaggggcctgagaaagacttcaggcattccactgaaatcctagaaagactgcaccttaggaaagaacattctacccctgaattaagggattcttcctaggtctaagggcaaaacaatgaacttaccctaaccaagcctccagtggctccagatggtctaccaggaatttatctgggaccaggggcagtggttcatgcctgtaatctcagtgctttgtgaggctgaggcagaggatcacttgaagccagtagtctgagaccagcctgggcaatgtagcaagaccccatttgtacaaaaaaataaaaaaaaataggagtaaatgcctgtaatcgcgataactcagaaggctgagatgggagaatcacttgagcccaggagttcaaggctgcagtgatctatgattgttccattgcactctagccaggcaacagaacaagaccctgtcgaaagagaaagaaagaaagaaagaaagaaagaaagaaagaaagaaagaaagaaagaaagaaagaaagaaaagaaagaaagaaaggaaggaaggaaggaaggaaggaaggaaggaaggaaggaaggaaggagaaagaaagaaagaaagagaaaggagaggaaaggaaaggaaaggaaaagggaaagggaaaggaggaaggaaggaaggaaggaaagaaggaaggaaggaaaaagaaagaagacttgggaacttagtaataggagaaaaaaatgagtaaaacaaaactcaacactcttaagaagaaactaacagaattcagagtctttacaaaatatcattcacaaaggcctcagaaacctcactcctggccccacttgtccccagctctctgtggaggaaagtacatggagcccctgggaattgtgggtttcctagttaaaaaagaaaaatcttctagcaaaactttacactgtaggccaggtacagtggctcatgcctatactataatcccagcactttgggaggccaaggtgggaggatcatttgagctcaggagttcaagaccagccttggcaacatagcaagatctcatctcgactaaaaatccaaaaaattagctgggtgtggtgcctcacctgtagccccagctacttgggagactgaggcaggaggatcacttgagcctggtacattaaggctgcagtgagctatgattgtgtcaccgcattccagcctgggttacagagaaagaccctgtctcaagaaaaaagaacaaaacaaaaaaaaaaacactgtaaaagaaaaaacacaggccactccctctagggtcacataatcaagccatcgaacccaaatctagggaccctgagattactttaggatggtgtgacatttaaattagagcctgaagatctggtaagcctgagccaggaagaggaaaacgatcaaatgcccagagacgagagagaacatgggtatggctggagtatagggaccagggaagggaggggaaggactggtaggaaatgaggcaggagaggcaggcagatgagaaagagcctcttccattgtattaagcaagttgggttttcctgagagtgatggggtaccaacaaaaagattcaagaaaaactatatcaacaaaattttagtgctgaaatatcctggcttctgtaatgagccgatctggagaaattaagtatgaggtatccaccgaatgtccagattctgtaagaaatttagttcattggttcagaactcagcataatggtttaggctgctatggattcttcagcctactaggtatgactaaaaccctggaagtaaatgagatactcagggagcaactggggaaataaaaaggcccaaggcagaaaactgatagtcaccagcatgcagcctaattggttaatgcattaacagatagcactggcataacatattttatagtacagatagggcctccttgaaatcagtctaaattaatgaggtgtccaacactcaggtcacttaattgatttctgtttctctctctgttttagaggatcttgtagaaaagtggttctctatcagtggacatgtggtatgtctgaagacgtttttggttgccacaactggaggggggatgactattagcacctagtaaatggaggccagagatgctgccaaccaccctaaaatgcacagacagcaccctataacaaagaaatatctagccctacatatcaatagtgctgaagttaggaaaccctgttgtagaagcactttgactaccgtaggcttaccagcccatgcacactgataacttctgcactttcttcccaagcatttctgtagggggatcccagtttatggttaatatcaaaggaccctcaagcacactgttagcatcacataactgaataaatctaaaatctgaaaataccagactacacagattttggggaatatgggaactattgcttttacttattactatcaatgtgagaaaactaaacagaccaattcagtgacagagaaggagtgcttaggtcagcactgagggttctctgctaagagggatacagcagatgtctgaggaggctcaacaggcatcacggatcctgtgcaggaggtctatgatgccatgaacacaaaccacatacagttatgtacaagagggatgagtactgccaggaagtgcttagtatttcacgtgtagaatggtctctctgatcttggaggaaatattcaaccagtaatttgatatttggtttctgttaatgagataagtgaggatcatgtaaccaaagatttaaagagtagcagagagtcccgttcactgattatgctggtgtagtgctgtgccgcgctgttatctaaaggaaagagggaagacatgggatttgcttggagctgagcctcagggtgactttgtcctcccagaagtgaatttcccactgtcttaagcccctgctctgacgcaaagcagagctgggctctaaagcccaaatggagaaaagaatccagtttgagccaaaccatttagcctggtattccaatgggaatgggtgtgtctggcaaactgataagatagtggaccaaaactctacttgaatggagaatcgcagaacctctcaaaagagtactggagggcagagtgagagagagagagtgagagtgagagtgagaatgagagtgagagaaagagcaagagagagagagagcgtgtgtgtgcacacaagtgagcatgcttaagcaagtgaatcaggctaccttccactccaagtgtggtcctccaaccagcaacatcaacatcactcggaaacacagaaatctcaggcccaccctgacctacttatttagaatctgcattttaggaagatccctggtaaagtctgagaagcactgattttaccctttgttgagggaagagggtaatgtcctcaggtacaggtggttactgtctaccagaaaccctctccacccatccccttagttcatatctaaatgctgtggcacccctagaagagctatttcattgaaactctgctcacttgttgggttaaagacagatacagctttggtacagggagcacattaggcaaatcaagggaaatacatttcctcacactttgccaaacacagctacggcacctctcaacccatattcaaggctctgtccagattcctcaaacatctactccctccctctgagcagaggacctcccaaagttgacttaagtaatcagatggaaacacctcagctctcctctacccaatacataagtacatctggcttcctctcacaaaccacttaaaagagcagaactcctctctctatacaaggtcaaatcctgcagggctgccctggaatgcagacagctgctccctgcttagagatcacatcatgtcaaataccctctccactggcttcatcctgttggcattaaagcatgctgaattctcttcgagaattactttggaaagaattactaccctgtaagctttcctattcagccatgttgacttcaaaatttgtttagtacaatatttcaaacagaaattttgtgtctgctgcccattttgcacaactcttaacccttgtttacatttgtttcagatacatttgtatttccaaaataaaacaattgttttaactaaagttccctgtgttcctctctctgacctctgctaagaggtaactgctgccctcaagtgtgtccatacacaattcatgaatgctttatgtttgtactatatgggcatgtttccatatgcaacatagagtattattttgcaaacccttaacattaattagaaggtataatattatatggattattctgtatcttgctttcacatgaacagtttttgagatattacaatgttgacttcatgctctctttacttctatgctattgctggcatttatatttcctctttttaaaaccccatgacatgttctcattgttttattcaaccagagtttgtgtgattcacctacacggttatcccatcctttttttataatttttcccttcatgttcgccttctatttacaattacagtccttctgcctaaaatgcaccctttagaatcctcttaatgagagtgtgttgtgggaaaacttactcagtttttatctgaaaaatatctatattttactctcattgttgaaaaatatgtttgctgggtatataattctaggttgacaagtttttctctaagcatagtgaacatagcaatattccgtggttttctggcttttataacttttatcaagaagtttactgtcagttttattgtctttcctttgatgattaccccttttttctgatctcatttttaaggttttatctttgcctttggtcttcctctgtgacacatagggtgtattttttgcttaattatttttcttttgttagaattcacaaatctatagaatggcttctttcatctcttctggaaagttctcaaccattacctattcaaatattgcttctgttccattctttttcttttttccttctgcaagttttattggaagtgtgttagaacatcttacttcattcttctttctccattattcattctcataacttctgacaggcttctcatttctttgattctgtgctatcttctgggtatttttttgctctatcttttgctttattgtgcacattataagccattatattttgatttctagaattattttattaatacagtcagtcctattctgtagcacctttctctttatttgtattttgtttatttcttaaagcatattcaacgtgtttgtcggtgtttaataattttactctctgaaatcttttccatcctaatacttacatttctgctgctcctgattcctgtgcgtaattttttattgtgggttatatttttagaattttatctgtggaactggagacctggttagaaagcaagatccccaaggagaattttgatttgcttctgcctcatgcctttggatctaccagccagaatcaagttgcactaaatttttggcaaaaaaaattttggcctatttgggtggttcaattttgggttgcaaacctacgtgagagatagtttgtggttacgaattttaagaggttttttgtttgtttgtttgtttttgtttttgtttttactctccttcacctactcagcttcaaactttgagatggacaattttctttaaagttccctggtgagtggtcagtcatgagactgagtggtttatttctagttcacaattacaaggaacattggccatttgagatataagctttcagtgtggggaaagggaaggggaaggaagagatttctactggactcctacctttggacagactctagacttactatgtgctctacagagccacaaaatccaaaactcaaggttactcaatttagcaaataccctcaaactgaaagctggtttaaatgctcttcttgcttctgggctcctggttttacttagtttttgacctctgactattcccaatgaatgcacggttcaatgatgcattttccaatgagttatatacccagcgttttaacagaaagatttaccggagtccctagtctattttttctatcagaattgaaattttcatctactctttatataaaattgtacttctaaggttcacatttgctatggtttgaattcttgtccccttcaaaactcatagtgaaatttagctgccactgtaacgtattaagaggtggaatatttaagaggtgttttcatgaacttaatgcctctctcatcctctctttgcctttccactatgtgatgttttctgccatgtgaggatgtagcaagaaggcccttaccagaggccagccccttgattttagacattccaaccttcactgtgatattctgttaacagcagcacaaaaaaattgactaaaaaacatttaattaagttattctgtttaaaatctgtgtgggctccacattgccctaagggaaacaccgcatcctttgcatggcttaaaagccgcctccgtcttgcctctgcagatctctcgaggctttgttcttatcagtcgtctcccatgaagcttttttgctgaagctggattaaactgcttgcaatcatcagagaaccccacatcctcttcctctctaggtattcaaatgctatttccaccccttctttttttctctctttccttcttttctccatattctgccttttcttatctgactgctggtcattgtcaggtttcagttttatcgtactttatggtacttttcctagaaatctggactcagggtctttcctctgtgcttccactttacctgtcttagtgtaattgcatctttacaggtttgtgttccctgaggtttaagactgactgtgaactttccagcatggtgtctggaactcagtatgtatgcaatgctgattctttgtaataaacttttgttacaggagctctttgaagctctagttgtcatcatcatggtacccgtcagaagacggtaatagaccaggcagaaatgactgtgaaccctgcctgctgtagatgaggtcatcaaaagtagatgctgcatgccaggtggacacagttgtccaggtacctcagtggccattgtcagcagactcaacaggtctgtaagtgtgaccagatccagcagaggggctctggagtggcagtggaagcaaatgagatatcactccggacaactgaacacactcacttgtaagaaagtgtgagccaccccctggaggcttccaaaagtcttgagtgacttttatagagaaatagagctctaagttagcagtgcagagccaaaagtatgtaatggaattcattgcttaattgattctataggcaagtgaggcccagagaaactcagtttatgcccagatggatatgacatcattcctgcccctcagttaacttaccaactagtggaagaaagagcaagttaacaaaatattaactttgcaggatgagaagtgctacagagctaagctatcagagccctggtgacttagtaacaaaataaaggggcctaacacaattgctacttctcccattacctcgcccataagggacccaaagtgtgaccaaaaatcagcatgggatgggtggagctgctggtttcctgatactcttatcttcattatatataattattttatcattcaaagtatttattttttttctaatctctaaccaggccacatttcttcccaactggagaagcagagggctagctgtttgagtctaaagagtggagtggtgagggctgagcctgggaattatgaggccaaatcagagggctttatgtataaaaccaggagtctagacccttcttgaggggaaagtgggatcctcctataatctagtttcctagaggtttttttttaatcacattctagagtcattggtctctgacagagcccccagatcaaatacttgaggtccatgcaggtaagacaacaaatgaacctggccagcctcctgatgggggtatggccactgccccggctaaaagggacaacatatcccagctccaagttcctgtcctgtgagattctaagctcagttttgtgagattcatggttttctaaaaaaggccaaaaagtctagattattcaaaaatcatatgatcatctcaatagatatagaaaaagcatttgataaaattcaatatccctttatgataaaaacccacaacaaaattggcatagaagggacacacctcaaagtaataaaagccatctatgacaaacccacagccaacatcatactgaatggggaaacccattgagaactggaacaaggcaagaatgctcactttcaccacttctattcaacatagtactggaagtcctagccactgcaatcagacaagagaaagaaataaagggcatccaaattggtaatgggaaagtcaaacttacagtataattatataccaagaaaaccctaaagactcatccaaaaagctcctagatctgatcaatgaattcagtaaagtatcaggatacaaaatcagtagcactgctatacaccaacaatgaccaacttgagaattaagtcaataactcaatcccttttacaacaactgcaaaaaacaaacaaataaataaataaataaaatacttaggaatacacttaaccaaggaggtgaaagatctctacaaggaaaactacaaaacattgctgaaagaaatcacagatgacacaagcaaataggaacacatcccatgctcatggatggatagaatcaatattgtgaaaatgaccatgctacccaaagcaagctacagattcaatgcaattcccatcaaaataccatcatcattcttcacagaactagaaaaaaatcctaaaatttatatgaaaccacatagccaaagcaatactaagcaaaaggatcaaatccagaggcatcacattacctgacttcaaattacactacaaggctatagttatcaaaacggcatgatactggtataaaaataggcagatagaccaatggaacagaatagagaacctagaaataaagacaaataattacaaccaactcatcttcaacaaagcacacaagaacatgaagtgggtaaaggataccttactcaataaatggtgctggaaaaactggcaagccacatgtagaagaatgaaactggatcctcatctctcaccttatacaaaaataaattcatgatggatcaaagacttaaatataagatgtgaaaccataaaatttctaaaagataacatcggagaaacccttctagaaattgacttacacgaagaattcaggactaagaacccaaaagcaaatgtaacagaaacaaaaataaataaataagacctaattaaactaaaaatcttctgcatagcaaaagaaataatcagcagagtaaacagacaacccacagagtgggagaaaatgttagcaaactatgcatttgacaaaggattaatatccagaatctgcaaggaactcaaatcagcaagacaaaaatgaataatcccatcaaaaatgtgggcaaacaacatgagcagacaattatcaaaaaagacatacaggtggggggcggtggcttacacctgtaatcccagcactttgggaagccaaggcaggcagatcacctgaggtcagaagtttgagaccagcctggccaacatggtgaaacacggttctactaaaaaatacaaaaattagccaggtgtggtgatggatgtctgcaatcccagctacttgggaggctgaggcaggagaaccacttgaacctgggaggcagaggttgcagtgagccgggatcatgccactgcactccagcctgggtgatgagagcaagactgtctcaaaaagcagaaaaaaaaaaagatgtacaaacaccaacaaacaacaaacatatgaaaaaatgctcaacatcactaagtgtcagggaaatgcaaattaaaaccacaatgagataccaccttaatcctgcaagaatggccataactaaaacataaaaaaaaaatagatgttggtgtagattttgttaaaagggaacacttctatgcagctggtgggaatgtaaactagtacaatcactatggaaaacagtatggagattccttaaagaactaaaagtagacctgctattcgatccagcaaattcactactgagtatctacccaaaggaaaagaagtcattatatgaaaaagacacacacacacatgcaagtttatagtggcacaatttgcaattgcaaaaatatggaaccaacctcaatgcctatcaatcaacgagtagataaagaaaatgtagcatatatacaccatggaatactactcagccataaaatggaacaaaataatggcctttgcagcaacttggttggagcttgaggccattattctaagtgaagtaactcagaaatgaaaaaccaagtgggagctaagctatgaggatgcaaaggcataagaataatataatggactttggggactcagagggaagggtaggggggagttgagggataaaagactatacatagggtacaatgtacactgctcggatgacaggtacatgagaatctcagaaatgaccactaaaaaattgcccatgcaaccaaaagccttctgtatgtatcccaaaaactattgaaatgaaaaaataaaaaaaaaattaaattatgtaagtcttaaatttttaaatatttattcaaaactctttttaactctttgaggactgacagggcaccctgggtgacctctggtctatgagccaagacttcaatgccccagcccaactcagccaggactgcactctagcatcttttggagaggaaccctttcattgtgaaattcctctttcctctcaccaaccccctgggtcagggtaaactcagtaagtgtggactgtctcatactgagttgtctccaaggggtcccgtgaggttgcagggcacccgttgctgtggagtcctaaagagggctttcagaggcacaaagaagacagacacagcaacaataacaaatgaatgaaggaatcagtttttcccaagaaaagagccactgtatcccaataggcctgtaccaattccagggaaagaacaacatagcgacaacataaagcaatctgtgtgattaggatgctgcactcatcccagccaggtacatgtccttgaactggaggtgctgcgcacggcacctgtttacaaattaggcaaccggaggtgctgaaaagtattcatctcttctgctgcttccttcagtatgtataatattagcaaaatgtcccagtggctggtaaatcatctttaattcctttggaactcatcatagtaatgttaaccatgatggattcttgtggtatttaaagaactagattgtcaattagcttttatgagatacatcacagtcatcagcctcatatcagacctccctttccaaagaagccagttattaaaatgtacaataatttgcttttattataatctagctaaaagccaaagctagtctccaaaataatttaaagttttaagttgcaatgtaagagaccttttcttggaaatgactgtataatatagtgtcaccattgttggttaattatttttcagagtgtgaatttcagctaatcgtttcctgcaaggaccaaataacataggtgcttcctaacagcctctctgggaataactactgtcctttcagaagctaattaatcaagctgtgctcgtaaaaacttaagtaactacccaccagggtgagagtcccccaagacctccctgctcctggaagtctcttgcccactgtattgaccttggccgagagaagggcagtgagtcaacttgacttggcacagcacccaccagggaccttccatgccatccagcatggtcatctgcccagggctatctggaactttaaaacctcatctttactgagagtgcccttcagaacttagccagtgctacctgcagcttgaggaggcaaagacagatgagctcccatggaaacgtgggaaggtgaggaaaagcctagttctgtgttttgatttcagtaaattattgtgagtttaacttaatcaccatttgccaggcacttgaggaaaatcaaatcagggaattagctctgacctcaggaatatacagcccagtggtacaaacagacacaagctactggtaagaggaagcagagtttgcagttcttccctctgcagccccacaaaggtgcatatctccactatcaaatttatctcacgggactgcaattcatagactcttgtcattgtgtgtgtctttctccctagtagcctgtaaattccttcaaggcggaaaatttcatctctgtatctgtggtaccttgaacagggtcggtcacatatttgtttaatgaatgaatgaatataataacaataataagtaacatttaatgggcctttaatacacatctatataagcaggtcctaggttagatgctttacaaatatctcataaaattcctccaacaattctagaagggattgtatagggaagtatggagttaatactccccattttactgataagaaacgatacttggagagacgggagtaacttttccaaagtcccagagctgttaagtggcagagaacaatggatccttggtctggctgactcgtaggttcatattcttttttatcattatgcattactatttcaataaaaactccagaaaggcctacaaagttacacacaatcacatacatgcaatagagggtgatccattccaaactaaggcaggaaagcaaatacaacatgtgccataagattctggaagccttcctgcaggcagtggtccctgagctggtctttgaggcacagaaggacttttattagcattcccatcaaaaaaaaaggaccatgcagaatgcagggaaagggaggctaagtattgatatgagggtgtaagcgtgaagagtggataaattggctacaccttggaatttacttctatagtctctgtcgaccttgtagagcttcaaataagcagcctcaataccacgatcatgtctccaatccccagcccctgatattaactcaagagcagtacaaactgaatcaatgcaccaaatgatttttccccaccgctcccctgtgtgcatataaacacacatatgcacacacaccatggatacagacacacaccatgacagctgtgaaaggaagggggaacaagagctcagtcgtcgccgctggccagaggagataacatttcaggcctgatttaaactgcccattatgtccatgattcttgctgatgggtgcctcacaataaatgtcctaggcttgtctttatcaagcctcctccagtcaaggctcagagttatgagtcactgttggagggagaaggaatgggcagggaaggggttgtcagaaaaggtgtgtaaatgggacaggtccagtggtcagggcatccatacattatttctcagtcagtttgtttacataaccacaattcattctcttgggtgccctagaaaaacaaatggctagagagctgaattcaaaatatattatttgagctaaacacaaataagtaactcagttatgaggggaagccccctctcacccatcattttgccaaaatgaactcttcatggttgagtggccctcccctcacccccattcctaagattagtttgagcttgctctggaatatttattgaggagacctttcattataaagcagccaagtaccagttacctgaaatatatgcaagtttttaaagtctacattcaaggtttaaaacctttttgtgtatgaaaaatgttctacctggcctctccctgtctcatttgggagattaaacggtagctatatagttgaactgcaatttgcttgactctgaagaagccattatcattgaaattcaagacccttgatctaagatgtcttggagaactatagcacactatatactttattttagagtgcagagtacaatgcagaattaggccttgtaaaaagttacaggagaaagccttgtatgaaacaaaatatagttgtcataacaactgatctgcatgggttgtacatcacccagaaagtttgaggtgtgggttatcccaatcaagggaacagctggagtacagtcaacagtaaagcaagcaggctattttcttctgctatgaaaatggatttttcctcttgagtgaacaatgcaggaatgtaactgaagcaaagagagcctcagtctgggagggacaaggatagtaaaagccaaagaaatattccagcagggagatgatcaggatggcaaggatccaagaaagacaggattttgcaaaagcagacagcctaacttacaaggtcatttaacaccaaacagtaacaaaaaagagttctaagtgaaagacagcaaaagcacacacaaaaaagagaatcgaggttttatcagagacatttgtcaaatgaagttatagtatcctgattacaaaaaatgtggtaaggttttcactaaggttctcatctcttttgagttgccatgatgttggtcagatgcagtcattagccaacctagtaatctgtcaatgctatgtgattaaaaatgtgccagtcaccataggtcatttttcagcagtctgtattcagactatattcagatcatctgaacacagtcaccaaaaacacttgtttggaatacaaatttctaggctcttccacagacctacctaatccaaactcctaggaaccaggcatgggaacatgaatttttaatagagcattccaagtggatcttaagtatactaaggtttgcgaagtactaccatattggacaatagagaaaatatgagatgtggtcccacctgtcacaaagcatgcagtctacttgtagaatttagacagtgcttaagagtcttttgggtgctataggaccctaaagacaattaaaactcaaagagtccttcaggaaaacttccttaatctcactgtacttgccagacaaatgtgcctttcattttgtttgtcaactttcagatgacattgcctcttttctacttcttatttatttatttatttagtgtctcctctcatgcaacttaagtttcttgagaacaggagctgtctaattcatctttctgattcatgaatgcttgaatggatgatacataaatggaggagggaaggcaagagcatagcaattagaaaagtcttcctagagtaggaatgtgttggtgtaaaaacagggttgtattatacacagagcagaggaaagagcatgggtaggtatgagataaccatataagcaaggtgacagaggcagagaaggggcattgcgtatgctaatgcccaaatgtgttaaatactcaaagcaatattatagtttcaaaaacattccaatttttacatttcatttaaaattgtattaaaaatataaactacctaggaataaatttaacaaatgtgcacaagacttctatactaaaaattataaaacattgctaagagaaattaaagaagtcctaagtaaatggtgagatatactatcttcatggattgaaagactcaatatctccccaaaatttatctatagatttagtacaattcagttaaacatcaagtaggttttttttttgaatgttaaaaaacaacttattttaaattttttttgtggggagcttgataatattattagctttatttgttccagaatgtgtaagggcagcaaaagccagtcttggaattgtgtctttaaatatgcatatatatatatatatatactattttaaattttatttggaaattcaaaggaccaagaatatccagtctgaccttaacactcattataaagctattgtgactaagaaaatgtttttgttgaaagaacagacaaatatgtcagtgaaacacaattaagagttcacaaatagacccatacacatataaaatccagtgatttgtgatcagaatggcaaagcaattaaatggggaaaattatattcaatacttttttttgagatggagttttgttcttttcacccaggctggagcacaatggtgcaatctcagcttgctgcagcctccatctcctgggttcaagtgattctcctgcctcagcctcctgagtagctgggattacaggtatccaccatcaagtctggctaatttttttttgtatttttagtagagatgggattttgccatgttggccaggctggtatcgaaactcctggcctcaggtgatgcacccacctcggcctcccaaggtgctgggattacaggtgtgagccactgtagccagctttcaatatatttttattaacaactgaatattcatacaagaaaaaatccatgagtgttaccctacaccatacagacaagtaaattaaaaaaataaatgttaggcttaagaaaataacatgattcaaagagaaaagatagagaaacgtcaccatgaccttgatgtaggcaaagagtcttagcacacaaaaagcactaaccataaaaaaaattgacaaattatacttcatcaaaattaaaaaagtatcccatcatcaaaaaaataattaagaaaataaacaggcaagctacagatcagaaaaattatccatatctgactatatatttactgcaattcaattacaaaagaacaaatggcctacttttttacaaaagcagaaaatatgaacagatatgtcataaatgaagatgagtaaatggccaataagcacatgaaaaacttctcaatattattaatcatcagggaaataaaaattaaaacaatgaaataccactacacacccattagaatggctaaaatgagagaaagcttgacaatcccaaatgttggcaagagcatggagcaacaggaactctcatatattgctagtaaaagtttaatgatacagttattttaagaaatagtttaagagtttcttaaccttctaagaatattaaacatacatattatgactcagaaattccacagcaaggtgtttatccaagagaaacaaaaatatgtgtccacaaaaatccttataaagaattgtttcttcataattatcccaaactataaacatctggatgtccaccataagaagaataaatcactgtggtaaatttatataatggaccactccttggcaagggaaaaaaactactcatacattctatcaacatggataaatctcaaaaatattacggtgagtgaaagaagccagacacacatacaaaagtacatactgtatgattctatttatacaaacttctagaactggcaaaactatctatggtaaaagaaataaggtgagtgatcttcctggagggaagagattgactggcaaggggcacacgagagctttctggggtgacatatctgaccatgtgtcttaaaatgggtctgggctacacaagtataggcatttgttaaggcagttcaaattgtgcacataagatctaagtattttactgttcatagattgtatctcaattttgtttaagtccacaatttctagatgacttagaacaagataggctatgttgtggttaacaatccccaaatcttaatggcttaatacaactaatttttatctcttcttcaaagtatactgcaggactgggcaactgtccagggtagccttccttcacgttgtgactaagatccaggtcccttcagtgttgcatctccgcatctcatcttgatgcctctgccagttttcttaaagaggaagagagactggtgaacctgcaggggctttcaactgcctctacccagacatgacataagttacttcctctcacatcctatagaccaggagcagtcacatggcctacacttaatgtaaagggttggagagtacagactcctatatgcccatgaaataaaggataactagatactggtgagcattagaaatgcctgctacaataccttccttcaggcccttccattttatcaaagaagaataaagtctaactttctatcagatgattattacaatttcatccttgtgttcagacatggtcttattaatgacatgcccttctttcaacaaagggagatgtttcccttcttcaaacatggctgagctaatgttttctggtagacaggagtaaagaattctataaatgtagaaaaacacaacaaaaaaacaatctgtgaaattagctgaagaagtcagagcagatgcacatccaagttcagtgagaaggagacacaggattgctgaggtaactctgaggggcacagagtgacaagtgactgacaggccaatctggtccagaataaattatgattggggataatggccatgctagatgcatgctgctgtggagaaagtagacattatgaaagaaaaagggggtgtttatccggtccagagtgacagtttgctgcttgtcaaaaatctttatttccctataactttctgagtttgtaggtgccctggagaaaggcccactgtagcacaccacagaaaaaaaagggggaaagacaatacctgttttacaactaccttttctgtttgaaatttgcccaaatggtcttgaacatcacaacaattaaaagaaaaaaagaaaatgtttctgcagatccaataggtaagatgtcagggactctattttgaaaatatctgggaggcactgctgattaattttggcttatatttgagaagagaagcaggcacattttcgaaaccaaaatgtggaattttctgatcatgtagcacctttaaagttcagttatatcaggaatagtcagaaattggactgtataactgttcccacaaattgttcaaaggttacctctcatccagtagacagggactgaggttgcataatcaccaaagcccagctcagagaggaaacacacagaatattaatatccttgaagaatttccatccacttgggaagagagatgtagcttgattgcaggatgggttaagcatgtgtagcacacaaacatatcatcagtgttgttgatctagtgcctgcctccacttattccagaaaattgcaggagaatgattgcagggtgccaaaacaaggctgtcagctgtgaacctggtgattgatgtggcttgtttaagtgtgttcagccaaaaacaatttggggtggccagatctaccttttcttctttgggtgcataattgacacaccccatttaggtccttgactgatgtgccagtcaagaatatttctgttcaagagaaagagaacccaaatcaaattggcttaaggaaaaaacaaaggtaacttatgtgactcatatacctgaaaaagtacagtcactgagcttcagatacagctgtatccaaaccctcagatgatttgcacctcacctttctccaaatgttggctctgctctcttccttatggttttactttcagttacttgtgatttcaagacacaatttcaagtgtgatagataagcaggagtttattttctaatagatctgttcacattctctaactcacactctttagaccaacatcttcatcttggtataatgaaacaattcctgtggtcaagagatgtaattacactgattaagtttgactcatattgcaactccttagccaatctcctctgactactagggtttggtgttctgattggtcaaaccagagtcacatgctcaacctctgagagtatccccacctgaaccaccacgtaagagtgtggggagagaaactgtttcacaggggaaattctaggtatttatcagaagaagcagaaacagaatctgggcagacagaaaaaatgacatctactataaccaaagctaatggtatattttaatattatgtactggaaacaccttcacagaaatttagggtagggtccatacataattcataaaattgtagattctgagggttagaaggtacatcagaggttataaaatcaattcccaattgtgataagttgcagccaaattttaacttggtaaatgaagtggaatagagtatgtggcacccttggtagattcttaaacatttgagggtccaaaaaatattactaagtgaattaaggaaggaaggaaagtctttacagagcttcttggttcaattaaagaagctcctcttactctcttaagggttttaaaaaatgtatttggacaggtcagtttcagcttaagtactggcatcatagactatatctgactaaccctcctgccgataacaactataaagtctgcataaattttttttaaaaaggaaattgttggaaggcactagagaacaacaaaaatctggaataaaatggaggagacataaccctcaaaaagaaggaagcagactaggtgggatttacattacttatttttctcaagggtcctacaagtttgcagagcacagggtatagagctcaggtataaaatgacagtcttaatggttaaaggctggaggttggagctgccagaacactgctgaaattaaggggggaattctcagaatgaggaacccacaaatggtggatccctcatatctgtgtacgactgccttcaaaaccttggatgactcttaaatgtcatgcattgatggcagtgctcccgggagccaagcagttagcaacagctgaatggctaaaatgctgagcagagagtttagcaaccactggtttcactttcaaattctaccaagttagaggagtttgttcaataccttgagctatctattgaaacatcagaagaaccacaccttaagaataaagactatactagaactatggactatgacctaagaataaagaaaaaacagaaatatatgtgctttaacaaaacctaaaagcaagcctccacaacatcaagattattcttcagtaatttaactgcctattgcaataaaacccaacagttttcagaaaaagataatggaatctagagtctctattatctacaatgttcagtatgcaatcaaaaattactagacatgcaaacaagcaggaaaatgtgacctataatttaaaaaataaaacaatagaaacagacctgtaaatgaaccagatattgaaaatatcagacaaatattgtccaataactactataaatatcttaaaatttacaggaaagcacagatattataaggaagaaatggcatattttggaacagatacagaaacactaaaaattgaaatattttaacttgaaatacacaatacctaaagtggaaaattcagttgggtggtctatagactgaatgtttaggccatgcccctcaccgccaatttatatgttgaaacctaattcccaatgtgatggtatttggagatagggactttgagaggtaattaggtcatgagggcagagccttcatgtacaggcttagtacccttataaaagaaaccaccaaagactcacttccctttttgccatgtgagaactgctaaaagagaggcatgtatgaaccaggaagcagaacctcatcagacaccaaatctgccagcactctgatcttgaacttcccagcatccagaactgtgagaaataaatttatgttgtgtataagccaccgtacttgtatactattacactgtataagacaaaggtactttgtcatagcagcctgaaaggacaaagacagatgggcttaatagccaactgaacaatgcagaagaaaaaaaattagtaaacttaaagagaaaccaatagaaattgtccaaagtgaagcccagagagaggggaaaaaaaggattctgaaaaatattataatagagtctccatgaactgtgagacaatttaagtggtctaacaaatgtcctttggactccacaaaggcaaggagagagaaaaaacgaaaaagataggtaacatatttataagaataatagctgaatttttgaaaatgatgaaaaacaatttctagaaccaaaaaattcaggaacccttaagaataattacaggctgggtgcagtggctcacgcctgtaatcccagcacttgggagactgaggtgggtggatcacctgaggttaggagttcaagaccagcctgaccaacatggagaaaccctgtctaacaaaaatacaaaattagtcaggcatggtggcacatgcctgtaatcccagctactcagaaggttgagacaggaaaattgcttgaaaccaggaggtgaaggatgcagtgagccaagatagtgccattgcactccagtctgggcaacaagagagaaactctgcctaaaaaaaaaaaaaaaaaaaaaaaaggaataattacaaagaaaaccacagtttggcacatcataatcaaactattgacaaagataaggagaatatcttcaaaccagcccaggggtggagttggggcatacaatatgttcaaggaaacaataacagctgacttcccatcagaaataataaagaacagagagtgaagcaagatggcagaagagaagcctatagcattcatctcctctgctcccccaaacaccaaattttaacaactacctccatgtaggaaagcactgtcacaagaaccaaaaatcaggtaccagcttggccttagtggggtagagcaacaagcaggctcttagggtccctgagtcccggcctagggtcttggacagcatctctggacctgccctgggccacaggggagctcacggtcctgatgtgtgggtcttaggcttggcagcattcaccaccagctgacagaagagccctagggtggcctagcagaacccccttgtggactggtggaagtggaggctacaggaagaggttcctctgcctgtggaaaaggaagggaaggacggaaaggactttatattgtggtttgtacgccaatttagcttcagtcgaatagaatatcaggtaaattgataaggtttttgtctccaatgtctggctcctagacatcatcactggagatgtctgggtcctgaaggaatttgctgccctgaaggaaagggccttgggtgaggccagtgctgtgctggcttccagtctcactcagcactggccaagtggtggtggccataggggtgcttgcatcaccatatcctgagttccaggtggctcagcagagatagaatccttttgtttgtgagaaagtaaggcaaaagaacaagaatctgcctgataatccagagaattctttttgatcttatccaagaccacaaaggtagtacctctacaagtctgcaaaaaccacagtattattgggcttaagacccaagaaccttcaaattgctggaaagccttcccaagcacaagcacaaacaagcccagactgtgaagactacaatacatacctaactcttcaatgcccagacattgatgaaaatctacaagcatcaaccccatccaggaaaacatgacctcaccaactaaatgaggtaccagggactaatactggagaaacagagatatatgaccttttagaaagagaattcaaaatagctgttttaaagaaacagagaaaagcaagataacacagggaaggaattcagaattctatcagataaatttaacaaagagattgaaataattaaaaagaatcaagcagaaactctagaattgaaaaactgcaattcacatgctgaagaatgcatcagagtctcttaatagcagaattgacaaagcagaagaaagtgagcttgaagacaggctatttgaaaatacatagtcagagacaaaagaaagaataaaaaacaataaagcatacctacaagatctatgaaatagcctcaaaggagcaaatctaagatttatcggccttaaagaggaggtagagagagagagagagagagagagagagacaggggtagaaagtttacaaagggacaatatcagagaacttcccaaacctagggaaagataacaacattcaagtacaaaaaggttatcaaacatcaagcaaatttaacccaaaagtttttaaatgactcaaggcatttaataatcaaactcccaaaggtcaaggacaaataaaggatcctaaaagcagaaagagaaaagaaaaaaataacatacaatggagtttcaatacttctggcagcagacttttcagtagaaatcttataggacaagagagagtggaatgacatatgtaaagtgctgaagaaaataaactttcatcctagaaaggtatatccagcaaaaaaaaaaaaaaaaaaaaaaagttattttggcatgaaggagaaatgaagacctttacagaaaatcaaaaggtgagtgacttcatcaacatcagacctgtcctaccagaaatgctaaatggagttcttcaatctgaaagaaaagaatgttgatgggcaagaagaaatcatatgaaggttcaaaactccgtggtaataggaagcacacagaaaaccacagaatggtataacactgtcattgtgttatgtaaactactcttgatttagatagaaaaactaaatgatgaatcaatcaaaaataaaaactacaacttttcaagatatagtacagtaagacaaagagaaacaacagaaagataaaaatccaggagatcaagttaaagtgtagaattttattagttttcttatttgtgtgtttgtttatgcaatcagtgttagattgtcatcagtttaaaataacaggttataagatagtatttgaaaacgtcatagtaatctcaaatcaaagaacatacaatggatatgcaaaaaataaaaagcaagaaattaaatcatatcagcagagaaaatcaccttcactaaaagaaagacagggagaaaggaaagaaaagaagattgcaaaacaaccagaaaacaaataacaaaatggctggagtaagtcccaatggactaagctccccaatcaaaagacacagatggcttaatgaatgaaaaaacaatacccaatgatctgttgcctacaagaaatacactccacatataaagacacatatagactaaaaataaagggatggaaaaaatattccatgagaaaccaatatacttatatcagacagaatagattttaagacaaaaactgtaggaagcaacaaagaaggtcattacatagtgataaagtgtcaattcaccaggaggatataatgattgtaaatatacatgcacccaacactagagcaaccatatacaaagtaaatactattagcactaaagagaggtcgatcccaacatattaatagctggagacttcaacacccccactttcagcattggacagatctatcagacagaaaatcaacaaagaaacagtagactgaatctgcattatgaaacaaatggacctaatagatactaacagaacatttcatccaatggttgcagaatacacatttttctccttagcacagggatcattctcaagcatagaccatacataagatcacaaaacaagtcttaaaacattttttaaaaatgaaataatatcaagcatcttatcggaccacaatgaaataaaactagaaatcaataacaaaaggaattttggaaactatacaaacacacggaaattgaacaatatgctcttgaatgaccagtaagtcaatgaaaaagttaagaagaagactgaaaattgttttgaaacagatgataaaagaaatacaacataccaaaaacatacggatatatatagcaaaagcagtacaaagaggaaaatgtatagctataagtgtctatataaaaaaagaaaaacttcaaataaataacctcataaagcatcttaaagaactagaaaagcaagaccaaattgaatccaaaattagtataataaaagaaataataaacatcagagcagaaataaatgaatttgaaataaaactattcaaaaggtcaatgaaacaaaaagctgtttttttgtaaagataaacaaaatttacaaatcttggccaaactaagaaaaaagaagaacaaaataaataaaatcagagatgaaaaaggagacattacaattgatcctgcaagaaattcaaaggaacattagtggctactatgagcaactatatgccaataaattagaaaatctagaagaaatggataaattcctagacacgtacaagctaccaagattgaaccataaagaaatgcaaaagctgaacagactaatagaaagtaatgagattgacgtcataataaaaagtctcccagtaaagaaaagcccaggacccaatggcttcactgatgaattctaccaaacatttaaagaaggactaatatcaattctactcaaactgttctgaaaaatagagatggaaagaaagaatacttcaaaacttattctacaaggccagtgttaccctgataccagaaccaaacaaagacacattttaaaaaggagaactacagcccaatatctctgatgaatattgatgcaaaaatgttcaacaaaatacttgcaaactgaactcaacaagacattaaaaagattgttcatcatgaccaagtaggatttattccaggaatgcaaggatggttcaacatacataaatcaatcaatatggtacatcatatcaacagaatgagtacaaaaaccatatgaccatttcaattgatgctgaaaaagcatttgataaagttcagtatcacttcatgataaaaatcctaaaaaaactgggcatagagggaatataacatattaaaagtcacatatggcagacccacagctagtaccatacctaatagggaaaaactaaaagccctttcctcttagatctggaacacagtatggatgcccactttcactacttgctctagatgggatttccagtattatgttattcattataatactggaaatcctagctagagcaatcagacaagagaaagaaataagatccaaattggaaaggaagaagtcaaattatacttgtttgcagatgatatgatcttatatttggaaaaaaactagactccaccaaaaaactattagaactgataaacaaattcagtaaagttggctgagcacagtggctcatgcctctaattccagcattttgggaggccaaggtgagagagtcacttgaggctagaagttcaagatcagcctggacaacatagtgagaccccatctctacaaaatatggttttaaaaattatctgggcatggtagcacacccctgtagtcccagctactcaggagactgaggcaggaggagcacctgagcctgcactctagccttggcaacagagcaagaccctgtcccaaagaaaagaaaaaagaaaaacattcagtaaagttgcaggatacaaaatcaacatacaaacatcagtaggaattctatatgccaaaagtgaataatttgaaaagaaattaaaaaatgtaattctatttataatggccacaaataaaataaaatacctaggaattaatggcaaagaagtcaaagatctctacaacgcaaactataaaatgctgatgaaagaaactgaagaggacacacacacccacaaaaaaatgttatttcatattcatggattggaaaatcaatattgttaaaacagttataccacccaaagaaatctacagattcaatgcaatccctatcaaaatcccaatggcattcttcacagaaacaataaaacaattgtaaaatttatatggaatcacaaaagacccaaagtagccaaaactatcctgagggaaaaaaaaaaaaaaaagaggaattacattacctgacttcaaattatactgcagagctacagtaaccaaaacagcatggtactggcataaaacagacacatagaccaatggaacagaataaagaacccagaaataaatccacacacctacagtgaactcattttttacaaaggtgccaagaacatacattggggagaaggcattctctttaataaactatgctgggaaaactagatattcacattcagaaaaatgaaactagacccctatttttcaccatatacaaaaatcaaataaaaattgattaaatacttaaatctaagacctgaaactatgaaactactaaaagaaaacattgggaaaactctccaggacattggtctgggcaaaatttttgagtaataccccacaagcacaggcaaccaaagcaaaaatggacaaatgggattacatcaagttaaaaatcttctgcagagcaaagaggatacaatcaacaaaatgaagaaacaacaccaagaatagtttaaaatatttgccaactacccatatgacaagtaattaataactataatatataaggagttcaaacaactctataggaaaaaaatcctaataatccaattaaaaaacagaaaaaagatctgaatagacctttctcaaaaaaaagacatacaaatggcaaacaggcatatgaaaaagtgctcaacatcattgatcatcagagaaatgtaaattaatgagatatcatctcaccccagttaaaatggcttttatccaaaagacaggcaataacaaatactggcaaggatgtgaagaaaaggggacagacccttgtacacagttggtggaaatgtaagttagtacaactaaggagaagagtttagaagttcctcaaaaaactaaaaatagagccaccatatgatccagcaatttcactgctgggtatataccccagagaaaagaaattagtgcatcagagagatactcccgtgtttgttgcagcactgctcacaatagccaagatttggaatcaacctaagagaccatccacagatgaatggataatgaaactgtgttacttctacacaatggcgtaccattcagccatgaaaagaatgagatccagtcatttgcaacaacatagatgaactggagatcattatgttaagtgaaataagccaggtatggaaagacaaacatcatgtgttctcacttatttgtgggatctaaaaatcaaaacgattggagtcatggacatagagagtagaaggatggttaccagaaggtgggaagggtggtggggatagggagagacaggaatagttaatgggtacaaaaatatagaataagtaacagccagttttatacttgatagcacagagggattatagtcaataataacttgattgtatatttttaaacaactaaaagggtataattggattgtctacaacacaaaggataaatgtttgaggggatgatacccaatttccataatgtgattattattcattgcatgcctgtaccaaaatatctcacatacccaataagtatatacagtatgtacccacaacaattaaaaattataaaattttaaaaaaagaaataatagagatcataggacatctgaaacactatgtttaaagtaacaaaagggaaagaaagtgtcaacataaaattctatatccagtgaaaatatcctttaaaattgaaggtgaaataaagacatatgcagctaagaggaaggggagaaaaatctgtcacctgtaaacaataaatgctgaagagaaatgatgccagatggaaattcagatctaaaggaagaaattaaaagcactggaaatgataaacatgttggtaaatataaaattatttttttcttaatttattgaaaaaaccatatggacagatgttatttgacggtgcttctcaaggtgttcatccacctgtgactcaagcttcctactgttgctccaagtcttggaaattgttttgggtttttgttgtcgttgtttttgttgaggcagtgtctcgctcttttgcctaggctggagtgcagtagtatgatttatggctcactgcagccttgacttcccaggctcaggtgatcctcccacctcagcctcccaagtagctgggactacaggcacatgtcaccatgtccagattttgtttttaatatttggcagagatggggttttgccacattgcccaagctagtctcaaactcctgaactcaatcaatcttcccaccttggcctcccaaagtgctgggatgacaggcatgagccactgcacccagcctaagtcttgtacattgttatgtctgcctgctgttgattggatgaatatgttgaattgatagggacacaaactgtgggaatctgtgtgaatgcctctttttctgaggaaatgaaagtaaaagctgtttgcagatgccagtgctagggtatatcacagctcctcaaggacatcttgacagggcagagaccaaagacaacacagtgagggcttgctggagatggccacctgcaccacactggcggtgactccatggctaagggccggtaaacagagaaatctcaggagtggagacaagctgccttcatcgagggtttctggaatggattgtgcagggttattcattcagcactcactacacatgtactgaatacctactatgtggcaggcattgtgacgagtgttctacaggggtgaagatgtgaaacagtcacagtcctgtcttcatagtatgtaggggagatacagccacaaatgaatctaatatgagaaaattctaaagtaaacactcataaaaataaaaatgatagcaatagctaacaggaagtaaatccctatcatgaccagcactgcgctaagcactttatatgcacgaaatcatttgacatccacaaccccctgaaaggagaaactgccaaccccatttgcaccagggaggaaattgatgctcttgaagtttcaccagatagaaaatagtggagctggaattcgaacctaagtgcttgattctgaggcccagtttctgatcacgacagtgcaggagcaggtagggtttggtgggatctgaggatggagattgcttcttcccaggaggatcatgtaagcctgcatagagaaggggcacgttaaacctaaattctatcttctaaccttgaagatagaatatggacttgtacagactagcgctccatgaataagaaataagagctcaggagtgccagggcctcaaaggaggagcaggtagagtttggtgggatctgaagacagagattgcgttttcccaggaggatcatgtaagcctctgtggagaaggggcatgtgaacaggccttgaaggtagaatatggacttgtacagactaacatcccataaatgagaaataagagctcacgagtgccagggcacaaggagcagtactgtgttagtatgtgctgctgggtgctagggatatactgcacccagtgttgatggcacagggtctcaggactggatcagacatgatcccagcccagtagtttacatggggtcaggtaggtcctaactaaatccacaaaggagagagtggcaaattaatcttttgccttgactgtagccacttgtaaataaaaatacgaaggtaccctgtagtcccagttactcaggaggaggctgaagtgggaggatcacttgagcccaggaggtcgaggctgcagtgagctgtgatcatgccactgcactccagcctgggcaacagagcgagaccctgtctttaaaaggaattgttttttaaactatgaagacgtttttcttccctgctgtgaaaacaagatttgtggaatttgaataaacttgtcaaatataaacctagtctggcagggcctttcttcaccaaaaaaaaaaaaaaaaaatgactcagacaaaaacagaagaggcgaggactgagataaagaaaaagacagaaacctgaccaccattgtcacctgttacaaacaccagccactttggtcatcggtgctaaggccaagccatgtgctaatttctaattctgatgctttcatgtagacaaatctagtcacccaaggcagaaacgggaagccatctgagacactggccatttccacatcacgttaagcaccaagtcttatcactattggcaaattgaaaacaaaaaagattccatttttttcctatgtattcagacttctctgccactgttcggcccccgtatttctgagtgacatggcctccttagtaattttcttgcttctagtttatttccctcttactccaacctctctgcttctgccgagtaggcttccacaaatgtaaagcaatttccacctcctgttgaaagcccttcagcagcttctcactgcacagaaggtagattttatacataacctacgaggccctttgtgacctcactcctgcctgctgtccaagctcctcttcacccactacccctggattccagcactcctctggtgcccattgtgtgccctgctgtttcacagcatcatacaccgtgtgactcactgtaagcttcccaagaaagccttttgtacagtcagggttctctagagggacaggactaatagcatagaatatgaaagcaagtttattaaggagaattgactcacacgatcacaaggtgaagtcccacaataagctgtttgcaagctgaagagcaaggaagccagtccaagtcccaaaacctcaaaagtagggaagccgacagtgcagccgtctgtggccaaagacccgagagcccctgtcaaaccactggtgtaagcctgagtttgaaagctgaagaacttggagtcccatgttcaaaggcaggaagcatccagcacaggagaaagatgaaggccagaagactcagccagtctagtccttccacgttcctctgcctgcttttattctagcctcgctggcagctgatggtgcccacctggattgagggtgtgtctgcctctcacagtccactgactcaaatgttaatctcctttggcaacaccctcacagacacacccaggaacaatactttgcatctttcaatccaatcaatttgacactcaatattaaccatcacacctttccttcttgtgtccacctggaggccccagctctagcctcatcctccctgggaagctaccactggcatccccagtcccggggcttctggacctaatacctcagcccacaccatgacctggcacagccacaatacagcagctgggctgatgcttcctagataaatgagcgccttttgtcctttgcttttctttcctgtgcctaccctcgtctccccaccactatcacctatggcccctcccggcatcacgatcatttgcccagagttgcctcccatctgacagcctccgagaaagaagtccaggcaagcatgaagctctgaaggcacacacattccctccctctcattgggggtcaccttaatttgccaacactgattagtgtcaccacccacaagtgatagtaagggaggcattagcaggagcaccagtgacacttcttggcatcagctggggataacgctaccttgaaaagtgagcctgttgacacccaggaattgaatttccagatcctgctggggaaccatgcagagagcttctcacaaattctggaagccccaggtgagatgtgctactcgtcccatcagctgaaacctattcaactccgcagattctcaatgtgcaccagcaaggtgctaggtgtcaggtccccagctcctgctctcttggaacttccactcagagatgatgggatgtcaaccaagtagtgttgccaagaggactcaaaggaaaactcatgtgtgggatgttaataactactaatgaaagtgggtctttatttaaacatttaggaactactgcataaaaaatgaatggttttctttaatcttgagcttcttggaaccttgaaaatgacagtgattgccatgaagctcaacaagaagggtccagtttgcagccttctcctcctaacatgctgacacagaacccctgtgctgaggcagacccaccctcaatccaggtgggcaccatctggattccaaagaatccacatctttggatagcatttcaccaaatagactatagcaaatgttttaggccaggcacagtggctcacgcctgtaattccagcactttgggaggctgaggcaggcagatcacctgaagtcaggagttcatgaccagcctggccaatatggtgaaaccccatctctactaaaaatataaaaattagcgaggcatggaggaaggtgcctgtaatcccaggtattcgggaggctgaagcaagagaatcgctggaacccaggaggcggaggttgcagtgagccgagagtgtgccattgcactgcacactgcagcctgtgcggcaagaatgaaattctgtctaataaaaaaaaaaaaagaaagaaagaaggaaatgttacagattatttcaatgcagaatcccagtgcaccaattacagagcgggcccagagaggctaaagctggtgataggtggatttctgagacagcctctcagcaaatgggtgcagaagtagggtgttgggaggatatcatctgagctcagccaagaggcggaaagcattccagacctgtgtaacaacttgcacaaaagcttggaggtctgaaacactgccacagcactggagaactgcacatcattctgtatcgttggagtgtgaaatattaaggggtgcagagcagaagagaaaatgaacaccctgcaggggacagaccagaaagacctttgaaaccacctaaggggtttgagcttagctgttgctttgttgtatctgtttgcttagtggctaatgacattctttcatctgttctttcctccattcactccagcagcatttagtgagcatgtgtgcggtgcccagctctacagaaggaaggagtgcagggaggattcaggggaggctggagacccggcaggggccggaatctgtaagctccgcagatccacacagctcccttgaaagccattctgttccttgtgcccacgggggaggaagtgacccacggtgttcagacatctttgggcctgggatggagagatgaggccaccacagcctgtcacctcagccagagtcaaattaatgacatggatcattgtcactgagggcatgaccttttgaaataattgaaaggaaaccttgcctgagagaggagtcctaggaagacagaagtgaaaacaaagctggagatagacagtgctggcagcacccacctctgatgccctcagcccagccatgtggggatgacaggaatacatagctgctaaggcgagtgatttacggagcacataccaggagggtccagggtggtggcaagatgcaagccatgagccagggcagatcacctacccaggcagatgctacctgcaaacacaaatgtgggcacagagaggccagtggaggtgaaaaatctccttccctgctacccaggtgagtgccggcagagccacacggcggtcagccatggcctctccatcagctccctaatgagcttccagccagacaagctgaaaataacaggaccagaccaagtgagagctgggtcccgtcaggtcttcagcacatgcagccaacgtgcccagccgaacagcaggcgccaccagttcctttctgtcaatgcaacaacctccaggtgggggggcccttctcccacctcccatgtgtgaactgagaccccagaccctcaccctgtgcccagcaaccccaaggcacagagaattttgtctgtgtctcctgatttcaagggagaggcaataagctttgatcccttagtgcctctgggatttgagggttacctaacaggcagaaagaagtgaaagacccagcaagtaagagcggggcagctggtgattcccagagtgggttccaggagcacaggcctggagatgttccctccaaacaggcttccctgttgacagtaacactgcgcatgtcacattcattcatgagaagagttctgagccaaggaaacaggagacactcagaccctgaggggtggagggatgcggtacatccaagaagttctgacccatcaaagagttgctagaagggcccaagagtgtctcacaccctccacttgtctaactggcttccacccctcccacaccagcaagtacccttttcctggtagaaaaaaaaaaagcaattgagacgatgcagttcactgaggcttactggaaatgcataacaagggtttgtcctcctaggttgctgatcaggactaaatgttgctgtcccaagagcaataggttctctatactacaagttctgcttatgtgatgtctcagactggggttaaccacctcagctaattagtagaaaggcttccagccacctacacatgacctgtgatcctggaaggagaaaaacgtctgctgctgaaccaaagctccttcacccttctcattgccaaaaaacagcttcgcagtcacatgggaaatgtctctttggacttaggaacaatggcctccagcagcattttggaatctcacccatcagtaactagaggagcttctataaatctttgtagtgagaaaagttattgtagcttcagaattggatagctaggttggaagctgcagtttggccacaactggctgtgtgacctgggggcaagttcctctccaagcctgttttctcatctgcacagtaggaccatagctggagtttactgattcctgttccattgctctgtgcttaccagagctcatatatcttctcttccattttgctcctatgtttactatttttgctcctgcgatgtattgataactggccaccacataccggttccaaagagaatatttgtgtgagggttactgttggcctcatctggcaaagctttacaaggctccccactaggctgcaggtcttgtctcctccctggtcaccaatacaggacatggtcacctgtgcataagacattgggctgtgggtgaggcaggcagagaagccatgtcccagaggctgtgcatgacgactggccagatgcttctgtctggtttgggtggttttcttccttccctcacaggacagctggggtagaccatagatcccaaacctccctacgcagatttcatcctgaaacatttgctttccaagtaaagccttaacattcaagaagacagccctcagctcagagctggctctctgcctgaatttcctgttctctccctgtcggttttctgagatccacggcagttattctcaaaaaacctctgattgttcattcttctctccacgcaagttctgtggttctaaaaggggtttgggaattggcagcacggtgatacactaattcctgatggccagaccaagtcacctgctaggtttgatcagaagagctccacctcccatcccagcgccccagggtctccatggcatctgggcatctttttcctcttgtgccctagtttcactcttggaaacctcctctccataagttagacctaagcctgtcagtgtatccctgctttggaccacagaaatttgctcagcagtggacgtatcacgcaaccagagcccgtgcgacataatgaccttgtgctgatacatatgatggaattttaataaggggtagcagctgccctgccttgcccttagagcatctccttaaaagcacaacaggtaggccagaccctagagtcaggagttagattttacaatgcaaggtctccagtctccagatttcacaacacaaggtcacaggccttctgaccctgggactgtaggcacaggcctcggaaattgactcagcggtctctcgggaggtgtgcagaaggctgttacaaggcacatccattcgtctctcaaggagggaagagtgggcttcatttttcttctactttgctgtagaaagtgtgtgaaattcagcccagattgtgtagagtctcctgcaggctcctcgcatgtgtgtatctaatatgcatattcaggaataaatcacgtttcctgcctcatctatatgggtatgaggggagaggagtctttttgttggcaagactttttatttctccaacagccccgttgctggaaatgctggcattgagtctctcactctcctccagatttaaagctggagaaacgtgctgcagccatttctctgcccttagggaagaggctgcctgagaacaaggccaactccaaggaactgggccaacaacctgggaagaaggaagaggatcgggatgacttaaccccaatccctgggtccagccgtgcctgtctctggattttgccattgtacaagctgaaatgttcccttttcacttaagtaaattgggtacagtttcctagctcttgcaagagaaagcaccctcactggcttaatgcccaagtataagcatcttaaatgcttgtctaaatcttgaaacgcagctgtggtgtaatatacttctgagtcagaagggctatttaggcacagcctttcgctcttgccagagccccttacatgacgctgtcactggatagtggctcagcccatgcgtgctcacacccagtgtggaaattcgctgccgctaaggcaacccactctctctccacacagctctacctaccaagaggcccttactcatcccccactccaatgcttctccctcaagccattggttggccccccagagaacaagtgtggaccttttttccttaagggccctctcaatcaaagtcagctgtcatgtctctgcaagacagtatgctcccctctaggctcaatttcttgtcacttatgcgcctgatacacagtcatttcctacttaaaatcaaatcaataagtgagtagtgcttcctttaatgagggctaaagaacagaaatccagttttacctcattatggagctgatggcctcagcatcctacaagcgcatcagaactctgcctggcttctcgacaggcaattacctggaacaccaggttcaaggatggagtggaagatgatggaagagtgtgtttttgtgaggaggccagaagacactcatattcgttacagccccaggcacagagaggttctccggtccagtcctgcaggtgaactaaagatgcctccaggggctgtgctgaaaatggaccagcttgggcccagcttctctgtgcctcttcctagtaaagaggaagaagaaatcaaaaggtgttaactgatggagaacacaagctttggagtcagggaggctctatttactttccaactctgcctcttcctgtttgaactggagcgagatacttccctgtatcctcttcctcagcagggaaaatgaccacctgtctcaggtgtgtagatatctaagtcctcagacccatatgtgaggacatactagtggcagttgttacaataatatgattatggccaggcatgctggctcatgcctgtaatcccagcacttcggcaggccaaggcgggctgatcatttgagtccaggagttagagaccagcctggccaacatggtgaaacctctgtctctactgaaaatacaaaaattagccaggcatggtggtacatgcctgtaatcccagctactagggaggcttgggcggagagtctcttgaacccgggaggcagagcttccagtgagatcacgccactacactctggcctgggtgacagagtgagactccgtctcaaaaaaaaataataatttttaaaaatttacaattatttctgactttttgaagcttctggcctagtggtgtcccccttgtcgagtgagtctgctggttcccctgtgaatgaagtgctactggcaattcaaacggcttgcctgccgaagctctttacgtccctccaaagtcacatgctgatcagattattttattaaagaacagagttattgcaaaggagtgcagctattcacagaacacaggaaagcaagcagccggaccccagcttctcccttagttggcttgaaagttcgagtgccagtcttcctcccagcggggtgcactgtgtgggggcccaagaagcgtcctgccaggaagtgagaactgcaggtgagttcctgggagctgaggctttggggagctctggctcttcctgcctcactgtccacaatccttgggctaattctggatggcagagtagggtcaagaatgctagcatcaaaccttccctaatgtgggcagttgaagggaggtcaggagtgacaggaagtgaagtcagcaatgctgagcatcacctaggcaagaaacagggaggccttgtagaaactgtttggtgctgcaaacctgtgccccactgaggcattatggctcctcctccacgtggagtgtcttctctgagagtgcctcaaggtgcgaggggcagtgggaagattgcagagtcccaggtctgctgcttattaacctcgagacttcagcagtcaccgcacagcttccagacctcgggtgcccacttgtgaaatgggaaagctgggctaggccagtcattcacattttgtggctatcggccaggtccctggtgcccaggcatgcagccacctgccgagggtgagctggcacacaggcagcacctgtttctgtacctgacagggagtgtctcaacagcagatgactccaaagtcaaggcccgtagagtcaactcagattttgatatgactgctcggtccccagagcactttagaagagtgatttggataggtctatggatggacaaatgaaaatatctgagaaagatgctacttcatggggtcctttcctttgaagtgatcagaaatagcatagaaggctgggtgcggtggctcatgcctataatcccagcactttgggaggtcgaggcaggtgaatcacatgaggtcaggagtttgagaccagcctggccaacatggctaaaccttgtctctattaaaaatacaaaaattagctgggtgtggtgatgggcacctgtagttccagctactcgggaggctgaggcaggagaattgcttgaacctgggagatggcagttgcagtgatctgagatcacaccattgcactccagcctgggtgacagagcaagactctgtctcaagaaatagcatagaaggctttagcaggaccattgataacagcaatacctctgttttgaagagtataaccataatggaggcttccaggactgaagctgaagaagagctttccaacaccagttgatagactactgggtaatgtcatagttaatgttgctagagtggccattaaaataacataattatgctaagtagtttgaaaaaaaggagagagagagtacaatggaacacacttgtgacatgaactctgggtaattgtgctgagataatttatgccaataactcctcgcaaacccccgtcaagttgaatgactgtctgctgagggtctcgcccattaggtaatttgatggctggtttaaaaagaaaagtgataggataggattgtgtctgggctaaatacaaggtgaggctgaagggggcaaagtgcaaaacaccaatcagctgtgttctcatgtcagatcaggcctggctaacacattttggaactgttatagaacgaggatctacccctgcggttttctagaacatagcttgggttttctcctggtcacctcaagttcttcccttcaaaatcaaatgccttagaggtgccacaagggctgactggttcaatgagttgtgcagactgttccatgggcagctttttctcccttagtatatcaagagaattctcacagtgaactattttgtacaggggataactttcattaagaaaagcacatagtccagcattttgggaggccaaagttagagaattgcttgaagctaggagtttgagaccagcctgaacaacatagtgagacctccatctctacaaaactttttttttaagccaggcatgctggtgtacccctgtagtcccagctactttggaggctgagtcaggaagatcccttaggcccaggagttgaagactgcaatgagctatgattgtgccactgcactccagcctgggtgacagagcaagactgtatatatagatttatacatttttttgagatatggtatatatatacacacatatatatatatatatatatacacacacacacacacacacaaaatataaagattcgtttgtatgaaaaaaatgccagaataacatacagggaaatggtaagaatgtttatctttgggtaagatttttggtagtttttctgtgtacttttctgtgctttcaaggttcattatgtttgaattagaaaagctatttaaaatgtcatctttcttgaagttttctacacttaatctctatcataactctatcttctcccacaactgtgaagagtttaattctcaataaaagaaaaatattagatcttaaatgatcttcccttgttccaccctcaaatcaatcactgatcaatttcccagctccttctcaagttcagtaaataaaaggaaactgtccaaaggtaaagtgcccgccatctgcatcaacagcctttactgctggaatgttccaccctttcactagtctaccctctcattgtgttccttcctcccccaggaagtgccagttcctcagcacagccctgcagcatttcctggcagctctgccagcctccttacctcacactgctatgagagccacaccatttctcatcgatactgctttctacccacccactcaactcagcagtgagctctctcttccaggaaaaaccatctcatccaagtaagtagtgagggcaaatgacaaatacacccttttccttaaagaatgtgattcacacgggtcatcacgctgagcatcatcgactcctggaatgcaatagtgatggtggtagctggaaggatggtattaagacttacctttggccctctgcctcctggttttcttacactataatctttataatccataatatcctgtccatcaaacaacctgcaacccttttctaagaatctgaaagtcacttctctggccgggcgcggtgtctcacgcctgtaatactagcactttgggaggctgaggtgggcagatcatttgaggtcggagttccagaccagccttgccaatatggtgaaacgctgtctctactaaaaatacaaaaattagccaggcatagtggtgggcgcctgtaatcccagctactcgggggactaaggcatgagaatcgattgaatccgggaggcagatgctgcagtgagccaagatcgagccactgtaatccagcctgggcaacagagtgagactcggcctcaaaaaataaaaataaaataaaaagtgacttctctgcttcttccaaagcaagagagagtccccactggtcactggataaacttgtgtgtttccgagcgttttggatcagatttattggcacttactggaagcaaaaaagagcctggagatagctctattttatttccatgatacctagtccccagttatatgacaactctagactgagcccagcatgtagaagccagaaactcattgaggtttttttatccaaattatttgctataaacatgagcttcctttaggccagagattcacaaatttggcttcacattagaattggttgggggctataaaaaatctccatgcccaggttgtttccatcccatttaaatcggtttaaacaacgattaatgcctggaggtgggtccaggcatagtttttaaagcttagcagttgattgcaacgtctaccaagtttgaaacactggcccgaggctgtggttttcaatgatgcctgaacattggaatcacctggagatgttttaaaagttctgactggcaggaatgcctgagactaattaagtagcaggctctgggagtggatcaggtgtcagtggtttttgaagatcctcagatgatgctaatgagcaaacaaatttgagaaccgctcccctagacaaatcccttcatgaaaagcacaaggaaacctcttggtggtgtccctcacttcctgaaaatagtaaaattggctccttccctcagactaccttccctgcctattagcaaatgtccattcttcccattgagcccattgaacttacttcctccagagcaattcatattcaatgtcgtccactctcaccttctgcaagtaaataacttcccatcccacatggctctgcctctctctatggctctgtaattcctgcaatctttcctggcaactggactgtttttggcaaacacacagacagatacacagcctagagagaatgtcacactttgacacttgagacttgttcatcttggaaaggtgcaataaatatctgacaataatgtaaaggaagaacacgtgctaaatatatatatccttacctgggcaggcagcagagtgaagaagggggcggggaaagggggcttcaattggataggtaatattttattcttgaaaatctgaagcaaaatttaacaaactgttagcatttgttaaatttgaatggtaggttcatgggtgtttatcattcttgtgcttttttgtatgcttgaaatatttcattaaaaatttaagagtctggtcgggcacagtggctcacacctatcatcccagcactttgggaagctgaggtgggtggatcacctgaggtcaggagttcgagaccagcatggccaacatggtgaaaccccatctctactaaaaaaacaaaaattagccaggcatggtggtgggcacctgtaatcccagctactcgggaggctgaggcaggagaatcacttgaaactgggaggcagaagttgcagtgagctgagatcatgccattgcactccagcctgggcaacagagcaagattctgtctcaaaaaaaaaaaattaagaatcataaaaatgttttctaaaagctgttctctctatacacagaggatatttatcctacacaccagttacagacaatagaagcaagtttactgtttcaattttcaacagcgttgggatttgtttttgtttttagtgagttgagtggttctagattggcattgaacaatgtggtagccactgttcatgtgtgtggctgtttgaattaacactaaaataacatgtaaaattcatttattcagatgcactagccatgtttcaactgctcaatactggcacggattgtagaacatttccttcattacagacagttctattggatagctctggtctagataatacataattacgtaacaagatgcaaatgacttttctacaattagtctcctgcttccctttgtattggcttgaactaaagccatctgtgacttagaagttatgagtgacacaagtaaataaatggtaagtctattgtttttagtctttctggaaaacatttactaaactcaaaatcactgaacccacatatcaagaactgcacatttatagcacttttgtgtatagatggatatctagggctaatatacaaagccttgaccactgacaaatactgggaagtagctgtctaatattaattaataggcgggaccaactgatgttcaaagttgtcagtaggtcagttcaaatagtaggtcaggaagaatgtctgcccagatagtcaggacaatataatttcaagcttttcaaattaccaaacgaaacaggttgctacagcaggtaaaataacactaaatctgtggaaagaaaagccctacttcccacctgcccccaaccctgcgctcctgctccattctaacagcacagccacgcacgttcacactctgctcatgccaacgtagtaaagcagcaatatagacatacagggcatttttgttttttaccaaagagaactatgttacacacttcgccatttgagctttttcacttagcaatatgtcatagtagacctccttatgcgtctgtagatatgaatagaactttttccccaatctctttctgcatatgcattgaaattcatacacatatattccacatacatagatatatatttctgaacatatacttatatatgtacacattatataattttataaaattatacagtatagttttttgtaatttttataattttcttgtaaaattagtctgtataagcatatattcataaatatattcatatatatatgaatataccattcataaatatattcatatatatacacatatatatacacacacatatatatacatatacatatatatatatatatacacacacacacatatatatatatatatacacacaccaatataccattcatgccgggcaggggcaggaggcaggcagcggtgttttcatgcattttctgtgatagctagcttgcgtcttttgtacctactctcttccctggcccttcccccaccagaaccatctcaatcccagatcatttacgttagcaagatctagtttcttccacatgttttccatataaatacgatcatatacctattcatataatcacaaacaatgactttttttttttgagacagagtctcgctctgttgcccaggctggagtgcaatgctgcgatctcagctcactgcaacctctgcctcccaggttcaagcaattctcctgcctcagcctcctgagtagctgggactacaagcatgcgccaccagctaatttttgtatttttagtagagatgaggtttcaccatgttggccatgctggtctcgaactcccgacttcatgatccactcacctcggcctcccaaagggctgggattacaggcatgagccattgcacctggcctacaacaacttcttattgttccctttatgtcattgtcacttagtttgggaccactgtaatttcaccaaagcaaacatcttttttttttttttttttttgagatggagtctcactctgtcgtccaggctggagtgcagtggcacaatctctgcacactgcaagcttcgcctcccaggttaacgccattctcctgcctcagcctcccaagtagctgaggctacaggtgcccgccaccacacctggctaattttttgtatttttagtagagacggggtttcgctgtgttagccaggatggtctcgatctcctgacctcgtgatctgcccgcctcagcctcccaaagtgctgggattacaggcgtgagccaccacgcccggccacaaacatctttttacattcatattgggggaaatttggccagatatcaggcaaaattcacccccaatatttcacgtagtttcttttctattttccctaagcattggatggtttgagaaataaagagacagagtacaaaagagagaaattttaaagctgtgcatccagctgagacatcacatgtcggtaggttctgtgacgccccctgagccgtaaaaccagcaagtttttattagggattttcaaaaggggagggagtgtatgaatagggtgtgggtcacagagatcacgtgcttcacaaggtaatagaatatcacaaggcaaatggaggcagggcgagatcacaggaccacaggaccacaggactggggcaaaattaaaattgctaatgaagtttcaggcaccattgtcattgataacatcttatcaggagacagggtctgaccaaaaatttattaggtgggaatttccttgtcctaataagcctgggagtgctatgagagactggggcttatttcatccctacagtttcgaccatagaagacggccacacccaagggggccattttagaggcccaccctcagaggtgcattctctttctcagggatgttccttgctgagaaaaggaattcagtgatatttctcccatttgcttttgaaagaagagaaatatggctctgttccacccggctcaccggcagtcagagtttatctctcttgttccctaaacattgctgttatcctgttcttttttcaaggtgcccatatttcatattgttcaaacacacatgctctacaatttgtgcagttaacgcgatcatcacggggtcctgaggtgacatacatcctcctcagtttacgagatgacaggattaagagattaaagtaaagacaggcataggaaatcacaagggtattgattggggaagtgataagtgtccatgaaatcttcacaatttacgttcagagactgcagtaaagacaggcataagaaattataaaagtattaattcggggaaatgtccatgaaatcttcacaatccatgttcttctgccatggcttcagccggtccctccgttcggggtccctgacttcccacaacacattcacttttccagacttctgtttttatttctatggagagtgtcagaagaggaactgctgggccaatgggagtttatttttctttgtttttggaaaacagtctggagaagtgcattaaaactttctcctatttatgccagcaatgtgcaagagtatcattctctcacacttgttcaacagcaaaagatgctgttactcttggaagttctgcccatctgatggatgtaaagtgacacctcattgccattgtgttgactttgacaatgacaagatctcatacctactcatctattaggcactcagattcacttttttctaatgagggtatttcacctacattttttcctacagttttgtccttttcttgtcaatttataagatctctctatgtatgttatagataccaactcttcattgggcttagaatttttattttacaaatctattttcatctgatttgactagtatcttttgaaattcaagattttaaaaaatacaaataggcctatcttttctgctataggttctgtttgttttgttttttgtttgtttggtttttttgagatggagtctcactctgtcacccaggctggagggcagtggcgccatctcggctcactacaacctccacctcctgggttcaagcaattctctgcctcagcctcccgagtagctgggattacaggcatcctctgccacgcccagctaattttttttttattttatttttagtagagatgaggtttcaccatgttggccagactggtcttgaactcctgacttcaggtgatccactggcctcagcctcccaaagtgctgggattacaggtgtgagccaccatgcctggcctctgctataggttttaagtgtcctttcatgattaagaaggtcctctccccatttaaactacatgtacagttcctaaaatttttccttaaaaattttttttacatgcatctttaatcccactagagtttatttttaagcatgataggagctggggtccatctctgttttcttccaaatgaatagtaggcgttgccagcactgtttattaaataaaccaatcttctcccactgaattgaatcctgtctttcttgtattaaattcttgtagcttgaaatctcattcttgatagtctattttgtccactgacccatctgtcctcatgccaatgtcatattaactacaataattacactgtagtttctcaaatctttattcttctgtttcatactttccttggatatttttggatatttattttatataagctttatgatcattttatcctaaacaaattggatcaaaacaaaatgctgtatagagtctaattggaagtttattattaataaatgtatgttaatttgaggaaaagacttttttttttaagtgaaagcaaagcaagcttattagaacaacagaatacagaaaaatgtctgctccatagacagggcagggtaccccacaggcagagtacctggaaaattttttttttttttgagacagagtctcgctctgttgcccaggctggagtgcagtggcatgatcttggcccattgcaacctctgtctcctgggttcaagcaattctcctgccttagcctcctgtgtagctgagattacagccacccaccaccaagcccagctaatttttgtatttttagtagagacagggtttcaccatgttgcccaggctggtctcgaacctctgacctcaagtgatctgccctcctcacctgaggtcaggagttcaagaccagcctgaccaacatggtgaaaccccatctctacaaagaatacaaaaaattagccaggcgtggtggtgggtgcctgtaatccgaactactagggaggctaaggcaggagaatcgcttgaacctgggagacagagattgtggtgagccgagatcatgccactgcactccagcctgggcgacagagtaagactgcctctaaataaataaataaataaataaataaataaataaataaataaataaaatatactcctctattttaattatttcctatttatattagggatagcttttccacatctattgttgtctttatttttccttctttgttcatttaatagacagtgttgataccaccttgcattcctagaataaatctcaaagtttattattcttttgcagcattattagacttcttttactagtattttatttagaaaatttcattaattcagtaaatgatactgatttttttgatatttaatgtcaggttttaatattaaatttacattaaactcacaaaatgaattgttggagcattctatagaatgctatggattgaatatttgtcgcctccaaaatttatgttgaaagttaatccccagtgtggcagtattgacagctggggccttaaagaggtgattaggtccattcacaaagtaatgaattaatgggttatcacagaagtagattaagtggttttataagaggatagacgccagggctagcatgctcagccccctcatcaggtgaccaggtgatgccctgtaccaccttgggactctgctgagagtccccagcagcaagaaggccctcaccaaatgcagccccttcacccttgaacttcttagcctgccatggacatcacctgggaaagtgttagaacacagaatctcaggccctattccagacctacagaatcggaatatgcatcattaacaagatctccaggtaaattgcacgcacagtaaaattggaaaagctctgacctgaacgagctggtagtttaaattggaattatcttttctttaatgtgtcatatagaactcagctatgaagtcattcagtcatggtaactttttatacttaatctatgctaattggtatgtttaagttttctacttcttgggctaattttggcattttatattttcgctaagaagtcatctgtatcccctggtttttacaactttgttactatggagttgcatgtttttattattttaatttcttccatcaagtgaggatggctggctcttcattttatatatttttgctttgcctcatttttctcgttatcaagctttacaaaaagccttatatattttcttgatcatttcaaagaaccagcttttacagccaattagtagtaattcttcaaagctaacaggagggggacactacaatgtgaaccactgtcatggatgaattcagctttgctttccattaacatcaaaactatgtacacatgcaaatctgaacttccaggggccaaagtattatgagaatgcaggattaataccaacctttgattcagaatcgcattctgagtagggtctacctccacctaagtggcctttctgtatacctaatcacattctaaatgccatttactgcctcgttaaataatgctttgagcatttgtatcttgttttacagttgatataccttttctacccactatttcatttgaaatttatatttaaaatggtataatagataatccgttactaagaggaacactgcctctaacctgattttcatgtactgagatcaactggggccccaggaatgccttgtctctccaaagggctgaaagggaccacagcagagtgtgtcttgaggagagagctaagaaagcaagtattccctcagataaagcaagaggcacgagttaaaattttagccatgccccaatgcaggaaatggcagatttcagatactcaatctagacaggcctattttgtgaaatgcattagctctcctctcccttccattaagaaaccaaggttttgtttgcccttttaaaaatgtatgaaaacctattacttagatactttgatttcttacctttgcaaatattctaataaaataaggatttcaaaagccagatgacggttaagtttttgcactcaaattgatccaagtttgggataatagctgcaaaaatataaagtgtagtttattgaatttaggattttcacttcactgatagaccagtcttaggttgatcattatggaagagttattacagagatattgctgaagccctccacaaagttaactttaatcttgtgccacagaccagagatttccgatctataataatctatttcataagcactcacagaagcaagcaattgaatagtcttccttttgtggtgtatttaggtcttctttaagtatctggactaaaaaccatcttaacttcatgttcctggcagtactgtgtttgggacattgttaaactccaataaatagtgctgagtactgaaaaggagaaaatcatcctgaatccttcctcagaagagaattgatcagttcacctgcttgataatatttttcctctctaatcaaaatgttcccctcctaaatcccaggatggaaaatgagtaagacagataaaatggtaaaattaaatgaaatgacatccattgcatttacaagttttgaaaataaaatactaaaggacagactttttgacactgaagtcttacataggcagaacattcattacgaaacaaacataactaaagtaaaatctcagtttttaagatcctgaattcattatttatgcttttcaactttttcttatggggatggtttaaatttaaatccaaaatatactgtaatatctcctctgacctcaagtcctggaaagataaaatacactgatttttgttgttgttgttgttagacctgatgtttccaaaatactctttggaaaatcttcctttcaaatgccactcagaaattcatttttttttttttttttcatttggagcatgcaactccatggctcagtagttgccatgggcctcagccttcagtctggcggtggaggggagacaaaccaggaacgtgagctttacaaaagaggttaatataaataccacaatggatatttcctggttattttggaaaaacttactgagaaagggcctgtgagaaaaggaaggcttcctgcagggcactgcacctaagcagataggcaggcagtggatgaaatagctaaaataaagataagaagggacagcttgggaaaagactgaaagaaaactacaaagaatataggttacaagaaaattctgttactagagcaaggggtttaccgatgggatgcaggtgaggacttgtataaggagttttgacatataccttgacacatactaatgtgctacttcctaaaacaaccctgagcgggtattatttttcagatgaaggaagaggaatggattgagtaatttatgtcaggtcacacatctaggaaatggcagagccagtactggaatccaaaaccaatgtcatattcttaacctccacactacttggcagctacatggaggacaaattttatggggacagaattgggggaaagatctatctggaattttactgcagtagactaggcaagacttaacaaggcctcaattaaaacactacagtataaaatggggatcagactataggctctggactcgagactccctcagctaaaataaaagttttggctcaacaaacctaacaggtatggttgtagaaaagaaactttggtgtgcctcagtttccccatctgtaaactagaaatagcaacactacctgacattaacctcagattttacagattaagagagaccatatacctaatgtacacttagcctagtggtcagtaatgggtgctcaaaaagttggccattattagaatgctacagatgacagatacagtaatggtcttgttaagagtaaattagcaggccggacgcagtgactcaggcctgtaatcccagcattttgggaggccgaggcaggtggattccctgagctcaggagtttgagaccagcctgggcaacacggtgacaccccgtctctacaaaaatacaacatattaaccaggtgtggcatcgtgtgcctgcaatcccagctacttaggaggctgacaggagaatcacttgaacctgggaggtggaggttgcagtgagccaagatcttgccattgcactgcagcctgggcaacactgagactccatctcaaaaaaaaagaaaaacaaagagtagattggcagaactaggggactgatttggggcaaagtggagaggagataatggatggaaaggaggcagggaaaactaacaggtttttcgcctggcgggtagttaacaaggtcgatggagaggcaactgactaaaatagagaagctggttcattggaaacagagatgacatcttttcctttcagacagtttgagtttaaggtgtcaacaggacatccaaacatatatgcccagtaagcacatgaatatgaaactcagggaagtggttgtggggagtcaccagcaaataggtggtgataaagtgtgttagaacagtgggctaaggataacagtccataaaatataaacattattttgggttaatatacaaaatgcaatgaaattcaaacgacatgaaaatacagaaaatgaaatttagtactgtgagaatgaagaattacttctgatatttaaatagtatgttcctacagtttagaaaaatgagggtactaaagcacattttgatccagtcaggacaaatgccctctatacactcagattgagtcaaagtttttacaaaggtatgctcagaaagaccaaagaaaatttgatgttatctttaacaaataatgcaacattttcaaaaaggccatttttataacactttttaaagcataatgaaaacacttggctctcaagattgtcccaagaattatccccaataaaatgcagtaggttaatgatctgatgtcagggtgctagctggtcaggtttattctgtaagtaattttctcctactatctaggattttgttttcacagaatggtaaaaatgttaacacaggtctgccgtatccattcagcaaaacagcatgaagtgacttgacttgtcctgtcacttgtggaacaaagccttctttaaaaactaaatggtctactacaatttaacagcatcccaccatcaaactctaaatatgaaagatgaagtaagcagccaccaaatatagcaattccggcactaagtgagtacctagagacctgcaaacttcctacttctgtcctccactgccatgtagaatttcaaggtatcacttcagggtgggaggtgatataggttatcagtatttctctatagggagggggtgctgttgacatttttggcagcacaggttttttagtgtgtggacctgtgttcccctcacaactcaatgtttcacattccaactctgccaccaacccttcctccaacccccaatccgaagagtgcctccactatctagagacacagaatataaaatacttctgtgtcccaccaattatcacacatgctaatttcatttctagaatggtaaaaatgaagcaaagactagtatctactcataagcatagaaagtttgacattttcttttttctgtcaacacctagctattaacatcaaaggctggaatcctggatggtcagttccctttgggcagacccaacctaaccatttttgccattttaaaaaagtgtacatgagattatcaggtagactcagtaaagcacgactggtccacctctaaacagcaaagacaaacacatcaaaaagtgactgtgattctcaaaggacaaagcccactcccaactcccaggggaaaatggaccttagtcttgtttcacctgtgtaattggaggcagaataggatgtgaattccgatgtgctctgcgtctggttccacaccatcttacagtgaaaagtgctgagtgactgtaaacccaacaggaaaaaacattcaaagtgtcatcactacagaaacaaacccagcaggaccacttctgcatgcaggcagtattaggtctcagatgctccctttctgcctcctgatagagtggatgcaggaactttggggacatgatgaaccacacacaaaatgaacgaaatggcagagcactctcattttggaaagtttctctcaggtaatatcccatcactgcctattaagactaaaggattaagtactaatttacactcataagggactaataaaatttcctggcctgtcacttaaggagaaaaaccagcagaccagacgtgaagataaaccctcagagctactaatgcctcattcaggactctttcccacagattagtgttgagattatcacacggcttacacagtagggaggaaatgcatagccaggactcttaccaagtccggtaaataaggaatacctagatactactgtttctgtcaatgccatagacacttagatgacccgttaattttacttcatcccaacaatgaccgtgcagaatctgcgtccctgacgcaaagcaggaagcaaatatttgggcaagaaaataaagtcagttacagatttcacaagtatcttgtacaccagtctgtaatttttaattagaattagctaaaagacattgtacctttcgcgtgtatgactgagcataacagtgcttaacagtgtctttattaagtgaatgcctgaaagtattcaacattaaattcaatttatttcacattaatgtttgcaaatacatcatcaattcttacatatttcaaatcaacttcaagtacagaaggcttcctctcaaataagtctcctgaggtgacataaagactgaaagaagcctatgacttgagtccaagtctcttaaccaacaatcaccatatcgtcactggtgaactcatacgtggggacttcaaggttgagaggagcaggacccaatctgatcctgccagatgcatcatagtgtgacccatggcaagggcagtaataaccaccaaaatctcctgcatttgcaatgggtacacagccaagatgagtgcaaacacctatcaggataacccattcaggtttctttactcgatctagatcatgctgtgggtccctcaactgtgataattcaactgcagcttcctgctcaatttccttctgggttctatgacgcacaaacaggggtttgcctctccatttgaaagccatgttcttgccttctggaatatcggataacttgatttcgattttcgccagggccaacacatcagcagaagcactcatgctggaaacgaactgggtgacggcattcttggcagcatatgcgacacccacagtagttactccagttaccaaataggagaaacctttcctagcctcgctgctttctcttgaagacttcgtactatctaaaacttcaaggcggcggtattcagagaagtcaggcaccttgatgtctgtgtgggaataacaaacagaagcagggactgcaagacaaacagaaggttaaaaaacacaattagatgagtatcccgaagggagtatatatcaggaaatagccctttatggattcacaggtaaaaaatcaaattctaaaaatgtgaaatatggcactcactgggtctcagaaatagtcaaattggcggtgctagcatataaaatcttaaaaatgaaatgaagtgaaccaccacctatcatactggtatgaaatcacaagatactatttgtaaattgagctccccctagttggttgaacattgctgattcaggattcacaacacctcagtgcatcatgctaaaaacgttaaacagcaaaataaacagtaataactcaaagtttccgaaaattcaactgccaagacttactatataaatcatgctaaatacctcccatactctctggattagaaggacaccctaaaactcatctagtccacacagtaagttgacgtgtgatcaccttattaaggcaaatgtctgccccttatagtccaatctatgttctcggaaaaaactgttaattcataaaataataatgatataataaacattctgtgaactgtataactctgctgcagaaaaattagcgtttctattttatactctagtgtataaattagtattactttaacttaaaaccactaataggcagagaaggacatccttatcagagctctcaaaataaaatgaaaactgcaaaagaactaattatttcaatttagcaagggaaaaaaagggcaaaattttcatatctccccctcttcagtaaagggcaatagttactgtaaaagtaggggtattatcttcccttttcactgctgtagttctctcaactggggcacttctagtctaggccataaaagagctcaaatgaatgttaaacaaataattactatgtagtactttgggagcaaggagtttctttggtagtttaaaaaacaaaaacaagacacagttacatccctctctccaatactatttttaaatatctgaccaaaaaaaaattttacctagtaccacttttaggtatgtttcaggaagcaaacctctttgcaaattgtatattcatcttaagaaatttgccacaaagtttcctttttaaaaaaggggacactaaaaattcctcttttagaaaatgtgtatccaaaataaagatcttttatgatgcatttttattgtaataaactgcaattctaccttgctctactaggatatcatcctaatatactgtacttccttgagtagtcaaacattacaatatggaatacctgaactgcttttcacatgattctcaaggtcaataactttatggaagccagaagtattcaaacaataatgaaacctaccaaaatcactctatgtgcttttctgactaaatcatttcctggagaagaccaggacacagataatggcaacttgagactcacatcccagaatctgtggagtcaaagtgacattacatcctatactactactctaacaaataaatgctaacctgccagtatatactggcatttggaattaagcataaattacttgctcctagcactacctgggattacagaaaagatgagcttcctccctaaaagataaaggaataaaaagttcatacttctacattaaaaacagtatccacaacccttaacagtatacaaggaaatgtacaagaaaactcaataaaatggctttgcccttctcattcagagatttggtggcaaaagtctcctcccactctatctagctggttacactttagtaggctacaccaccaagaatcctttcggaaattaaactgccctgttgcaaaaatcattctccaaatatttacatgagctgcattaggtctgactttcagtaagatgctagatttaattctaacctaaagcaaaatcaaatacttaaaggagaaaatttaaggaattttaacaaaacaagttttattttaaggttgagctccaatgcgccttggaaatctgcatgaaaatagtacaaccttcctctccaattcaagaatcttctccagatccaacccctccactcccataagccatcctgccatgaaccatctagacagactataatgtgaacttaaattacaggctgaaatgattacagaaaaggtttttgccttatggttctacattatttgcctgtttctaaaaatagtttctctaagtcaggtaaacctccaattttttttttattatactttaagttttagggtacatgtgcacaatgtgcaggttagttacatatgtatacatgtgccatgctggtgtgctgcacccattgactcatcatttagcattaggtatatctcccaatgctatccctccccctccccccaccccacaacagtccccagagtgtgatgttccccttcctgtgtccatgtgttctcattgttcaattcccacctatgagtgagaacatgcagtgtttgttttttgtccttgcgacagtttacttagaatgatgatttccaatttcatccatgtccctacaaaggacatgaactcatcattttttatggctgcatagtattccacggtgtatatgtgccacattttcttaatccggtctatcattgttggacatttggattggttccaagtctttgctattgtgaatagtgccccaataaacatacatgtaaatgtgtctttatagcagcatgatttatagtcttttgggtatatacccagtaatgggatggctgggtcaaatggtatttctagttctagatccctgaggaatctccacactgacttccacaatggttgaactagtttacagtcccaccaacagtgtaaaagtgttcctatttctccacatcctctccagcacctgttgtttcctgactttttaatgactgccattctaactggtgtgagatggtatctcattgtggtttacaggcaacctaaaaattgggagaaaatttttgcaacctactcatctgacaaagggctaatatccagaatctacaatgaactcaaacaaatttacaagaaaaaaacaaacaaccccatcaaaaagtgggcgaaggacatgaacagacacttctcaaaagaagacatttatgcagccaaaaaacacatgaaaaaatgctcagcatcactggccatcagagaaatgtaagcctccaattttttgaagaaactttagcaacacgacgaattccaaagatgcttttcttttgctattgaaatgttctccttccttccttctcacctccaggtcccaaggatgggctagggtactctacacctgccatggacagtttcttcaaaacccactgatgctccttaacaaatattcattcacaaatactttgcactaactgtatacaaaatccgacgttgtgaaagatagaaaaataaagaagatattaccttctctatgcccttaagcccaagggtggaggagttaccaataaacacaatacagagtgtaaagtgtatgtgctacagagacagacaaatcagcaaataaaaactttattcacctgatccttaactgagattgaaaagatgggtaaggaaaacatatggacatgtagcaacttagtggaaggaccatgaagaaagtgcagagcccagggtgaatgaagacagagtaaaaagaaaagtggcgggcaatttggttagcgtgtaggggaagagtcacaaacagctatcagtggagccaggctggtaacagaatgaaacacgcagacctggtaaagactgtgacaaactggagaagaccacttgctccaactgcgggggcggccactacacagcacactatggaattttcccaagtagaaactagatcccagtattaccggcttccagcattttaagagatgccattagtcttcccagtttttttgaaaactacacagcctgcagacacactgcccacaggctgccatttctctatctccgatacagggccaagtaaagatggaaggcgaggcaaagaagataaacggggatctaaggacagagggtgtggaatagcccctgcgaagagctcagtggctacgacaattcgtcttgtcaaatccctgctaccacatgtccacaccacggatcctggtgcgagtcattctacctcgtctgttttctcatctgtaaaatgtaaatgtcgtcaatctctgcccgtccttgacgactgattatgttgtgacactacactgtaactgaccttgtgtatgttttttttgttttttttttggtgggggggtgatgaaggggaaggacatgaagggatcggtagtggtgagaagaccaacttcccaaatattagtaagtttccatttcttaagcatgtaagtgcccaaactgtgctaacggctttacgtagaattcctccacctaagcctcacgacacccctacaaaattgataaagatatgaatccatttcacaggaagtacgtttagaaactcgcccaaggtcaaacgacctgcaagcaacaaaacccctcagaggtggctggaacagcgggactacagagctcgtgaactcggccgaggaggaaccaggcgaagccggcggacgcgagtccaggccggccaccagaaagacgccccgagcccgggggccaggcccagagttgcggaggccgcccagcccgacctgattcaggctccgctcgcgcgcccgcggccgctccctgctgggggccggaggagcgggcaccgagagacccccagccctgctcgcggccctcgccccggctcaccattgaggcccacggaggcgaccaaaggccggcgcacggcctggccgctcagcgactcccggctgaggaagggccgcttcaggtccaacacaggctgctccggggtggcgggcaccgtggcctgcaccaagggccgcagcgcgcccgccaccccgcgggacgtggccgacaggacgggcgcgaacgggcctgagcgggatgctaccgacaacatggcgacagccgctccaaccgccaagccggtcacagggacgaccttccaaccacggcgcaggcgcgaggaggcgcgggacgcgtgacgacagcgcgccgccggaaaggaaattctgcagtcctgcagggcggggcaaacttggagaggcgctgcgtcgggggacggggctacaagccgtcgctgggggcggggcttgcggcccacctgtaggtcccggtgccacctcgtcagtgtcccgagagatccccagaagaacgagagggctgaacaggggaccccactgacgtccggtgggccgactttacgatcctttagggtaaaaatttcatctaggaagacctagagataacaataaacgattatagtttaacttaggatggtaatatatctcaactacgacgaagtccagcacatagtaatcgctatgtgtttactatgatgatttttattatcttcatctaacaacaacaacaacaaaaaggccagaggcatctgtgcaaagctcgataatgctaatggattatgtttattaagtattcactgtgtatttggttttgcgttttattatacctacgttctttcatttgttatcaaggtctctatgaagtcagagctattactatcagcattttacccatgaagaaaccgaggtttagagagattcttttccaggaactggatagccagcaagatgtgaagcagggtaatctgtctcctgagtctatgctcttcagtgccaccactgtttcccaaagtaggattttagaattttagaggatgcacagagctcgctcattcatgttccatcacatagtgagaaagttttgttttcttttgttttgtttttcaatcctgattgcaccaatgagaaagtctcagtttggtgctaatacatctttaattaaaaaaaaaaaaaagtagagatgaggtctcactatattgcccactccagtctcgaacttctggcctcaaggagtcctgtctccccctcccaaagtactgggattataggcatgagcaaattcacttggcctcagtttgatcctaatatatctttaattcctctctacacttatctcccacttttaacagaaaagatcttgagttagaagctcttagcagagaactgagtctagagtgatttcattatatggttcatagtattgattttctatccatactggttttctattctgtactatactgagataaagtttttcatttaggtcaaaaataatttaaatattaagtaaatgttaatataagcagtgcacagaattggctctgtgctgtgcatgggctctgtgatctgggcaagttccctcacctctctgtgcctcagtttcctcacctgccaaatgggggcagtaatgatgccatgtgtgttgtaaagttactgggaggagtaaatgaactaaaacgtgtaaagcatctacaagcaggcccagcacacaggcagcaccaagtgaggatttgctagtggtgtttttatctgagatgccacctcctctaagaagccttcccttgatccttgctgactcgttgttattcctcatgccaggtccaaagtgtactgacaggtttcccctttgaccttcctatgactccccttagggcctaggctttgaccagccttatagcccaagggactatattgtactctcaagattggaggctgcctcctcaggggccaccctagccaggctcatcacacagctggctcagtgctctcccttggcaacaaccttaggataaaagacatttccagagaagttgtcacacagcatgcatggtttgagtgcttcacaagaaataatatcacaattccctctgagttggtaaggaaatgaaaaatgaatgaatgaatgaatgatccttcacaaaaccttcacaatgtcccagttgggtgaacagaataggaattatctccagacctcctgggttcaattttagtttcaccactcactagctgtgccctagggcaagttatttaatctctgtgtgtgcctccgtctttctcttgtaaaacagagataataacaggatctaccctagagagttattttaaggatgagatggattaatacatgtaaaatgcctagaactgtgcctggcacacagtatgtaaatatctgcaataataataactttctattttctagatgaagaaactaagactcagagaagacaaatgacatgcccaaagacacattgataagaacgcatctggtagtggtgttcgagtccagcgttgcagcagagagatgggtaactgtatggccgaacagctgtcttctcgtggaagaaggaggccaatgtccaggagtggcaggcatactggaacttggacttctgtaggccaacctgggttccacttggtagatgggggtcttgctgtgttgcccaggctggtctcaaactcctggcctgaagcagtcctcctcccttagcctccagagtagctgggactacaggtacacaccactgcaacccctcagtggttgttatttaactgaagggggttttagctttcatgtatcagctcactctggagccagacagcctggccttcatggcagctctgccccttactacctgtgtgacatcgggcaacgttactgagtgtcagatttcttatttgtaaaacagggataaaaatgacattgctgtgcaaattaaaagaaagaatccatgtgagatatttagcacactggcatacaatgagagcttaataaacattgttagttttgtaaactgagggaaaaaaatagccacaggcctgggaacataaatgcttggtaagcttctcagttccctggaagtctgacacgcaatgtgtatgtatgaacaaggcaggaggaagcatgacaccaagccttccttttaacaaacactgtttaaatcagaggtcggaagtcatggactggagattcattctctccccactcatttctgcccagagacacctggtgatctggcatacacagtgctatgaacctcagaattatttgctagcatttacaaattgtgagtactcccacatacaaactgtggtagatggaataatgcctccccacaaaaatgtccacagcctaatccctggaacctgggaatatgttactttacacagcaaaggaatgttgcagctgtgattggagattgagatagggagagtgtattagtctgttgtcatgcggctatgaagaaatacctgagactgggtaatttacaaagaaaagaggtttaattcacttacagctcagcacggctggttgggggggcgccctcaggaaatttacaatcatggtaggaggcacctcttcacagggtggcaggagagaaaataagagcagagcgaagggggaaccccttataaaactgtcagatctcatgagaactcactgtcatgagaacagcatgggggaaaccgcccccatgatccatcacctccacctggtcccccccttgttacaattcaaggggattgtaacaattcaaggtgagatctgggtggggacacagagccaaaccatatcagagagtcttcctgcagtgtccgggtgggtgcggcatgttcatagggtcttagaagagggaagcaagaggtgagaggacagaaatgccacattgctggctttgagggtggggccagaggagggacctgcaggcagagatagagctggaaatggaaaggaaaccttctcccttagagtctccagaagaagtgcagccctacagacctgtgttaggcttcagacctccagaattgtaaaataataaaattgcattattttaagccactcgaggcccatgtcctcaacaaagagaaagacggtggggtgctgtcagccagggtaggtacctgcttggtggtctgggtcctttcccactgtgtccattcagttacattacctgcccatctgctgaggcctcgagtttgggacctcaggtttatataattccttgcacaagcatgatcgattgattccggagagtagcagaacactgatatgcaggggaatctcctagttccaagtgtgagttgtagtctagacacttcctgttccctacagtcttttttttttttttttttttttttgagacaaagttttgctctgttgcccaggctggagtgcagtggtgtgatctcggctcactgcaacctctgcctcctgggttcaagcaattctgcctcagcctcccgaatagctgggatcacaggcacatgccaccatgcccagctaatttttgtatttttagtagagttagggtttcgccatgttggccagggtgatctcaaactcttgacctcacatgatccgcccgccacagcctcccaaagtgctgggattacaggcgcaaaccaccgcccccagccctcttccctactgccttgatgtgttcatctgggcaatgtgtgttgagggggcatagggaggggagctctaaggcaaatgtgctgggattctgcattcgtcatcctcaaaacaaaattggtccctaggtagttctgcctgtgatcctgcataatgtgcaaagccagtaagatgcctttgcctcatccccagggaacatgcctcccagccactttcatctcacctagtgcctacacagaaaggcaaccgcctccctgctgaagggaccccacgcctgtctcctgtttccacacaattaccccgggaaatgcctggcttcccatttccagttgcagccatcttgacagtttcagcctctccccacagcccacgtccctcacttgagcagcgagatgtgaagacagacagccgcttgagaactgcacagactgtccttaatctaagccatttaaaaggcatttgtgttccataaaacccgtttctgtaattctgtgcccctacttctttgaaagatgataaccctagggaggagattagccagggaggagaagttcagatgtgctaatattttaatcgctcattctttcatcacattagtcacattcattaagtatgattaatttcaggctttgttgaaaaccctatcagtttccctatcagccacacatccatctcttgccaagcaggctggtgcagtagcaccaaaagtcccccagtgttttttacacctggattgtattatgtgccccctgaaaatgtgtggaattaattgagctcatttgtttcaaatactttgcaagagcctgggctcttgagtcaggcggcctaagtgtgatcctaagtcctcccattgctggagtcacctgggcaagtgactgacgccctctgagccctggtgtcctcgtctgaggatggagataagaatacctaactcgaaagttggttgtgaagatgaaagaaggctttcaaattgctaagttagttggttatgattgtaattaagggcccttggagatggatcattcatccattcattcatccattcagaagatttgtgtacagtgactactgtatgcaaccctgtgtgtccactgctgatgagagagacagcagcaaacacagcagtcaaatgcgtgtggcccccaggaccttatattttagtggtggaagctagacaaccaccaaacatgtaatataccagatggtggtacgttctatggaggaaagaaaggacgaggggcagggagtcctgggctggtgggacagggtgctatggctcagagggaactcagagatcacctaattcaggccctgacctggagggctcatgctttgcacactgtgctaagaatttggactttctttctccaagaataaggacaatgagagccagcaagcagggaagtggagcaaggatggtgccgtccggctgctcagctgctggctggaactcccggaggactctgtgaggatgcaggtagaaggtgtgtaagcatgtgactgcatggaagccctcggcatgtgatccactccgtgttccaaattgccatcctttctgcgtgctgttagggacttcccccagctctccctgcagagtgaggagtactctgagacagacgggtctaggatgaactgtgttgatggagaaatgaacattttttggagggaaggaagatttcggggtgtggggcataagttgaaggagtatggctctgaaagtccttgggcagtttgtagaggacagagaaggtggtaatgtcagtttctgcccctctcccacctccacctctggccttctcagtggtcctatggctccctaccttcagtcatcttgttctcaagcctgaagtgctggatccactcagctgcaacccagctcaacacctctgtggaagctttgcccatcaatcaggagaagctgagatccagagactgatgcccacgttctgtctttgcagagggaagcccaccagagccctcttctctctggggaggagctggctccctgaatctccaagacaaacccagacagccctggggaccttgaatgtgagcaaggggagcagaaaggaggctccagcccacccagggcccctgcagggtctgcacacacaattacaggtcctcatttccctctcctaatgatgccccaaaacattaagggaagttaaatcaaaccaccaggtgtccagcatgaacagctgaaataataaattcacgaggtaagtaagacattttatttgtactatttcaaaattggtagatgcaggaaagcaaattgtgatgtgcttgggatttaatttgtatttcaaggtactaatgaaggtagcacccattttcccaaaggccttttcatccctgaatcttgagagcacttttctaagcatattgggaataaattaagttgcaaaacctccatgaaaaagattacggttaaaacataattttgaggaaccacttgagtttatccatttacctgcttttaagtacacacacctattttttttgcaattatttttcacaaaagaaggaactttgtgtgacgtatacaagcaggtaatggcaaacctccagcatctttaaaataaaactcaaattgggctgggcaggatattacatgcctgtaatcccagaactttgggaggccaaggctggtggatcacctgagggagctcgagactagcctgagcaacatggtgaaaccttgtctctactaaaaacaaaaaaaattagccagacatggtggcgggtgcctgtaatcccagctacttgggaggctgaggcaggagaatcacttgaacccaggaggtggaggtaacagtgagccaagatcatgccattgcacttcagcctgggcaacaagagccaaactctgtctcaaaaaaataaaataaaataaaaataaaactcaggctgaactaaaccagccttctgagtcaatgtgcagatattccataatgaagtatgctgattaataaattatttgattaccaggtaagtatacctgcaatcaatataactgccgaaaagctctgaattagaaatggtgcaataaaatttaactgaaaggtattaggaattggtagttttaattacagggaatgattaattgatcatttagacagtattgatctacaacttatttaattctttgcaatttaatttgtcagatttgaatccaaataactgatgatttgttccatgaatgccagagctggaagggatggggttggcagaagagacaagactggaccatggacctggtggttctgtgcagaggccaaagctactctccttcccacctggccctgtgctgggcctaacctggagccccctctatcctctgcctcattcttctccgggtcaaggtccagcatgaactccatgtcctccaggaagccctggtggacttgggcagacctggggacacgtccagcctcctggcaagatgggggtaacaggagtgtgtataaaggggaaggcaagaatgtgcccttggtggagcagtgaaaagaagccctcatgtgacaagtgttttgctcctaacccacctcctctggtgacatcttctgggttaactgctcttgctgatctctgcacataaaccaagctaactgtgagaggcctttcatttctagtttaaagcaaggagaccacagttccttctgaacactcacccccaaggagataaggagggcgtcccatgagcaacactgtgtgttaaagatgtacacgagcactgggacctgaccaaggacaaacacgtctccagccccctcagacccttgctgctgctcagatgtccgctgtcatcggtcacatcctaacctcaaccccctctctcctcccacataaaaggaggctgaaattcatagtaacttcagatggttctttaggacactggcccaccaccttctcggttgctggctctccaaaacaaagccccctcccttgacccaattccttgtttcttgacgtactggctgttgtgcagtgcatggtaccggcttgaactcggttatgttggcatggcctctggcggtgctcagtttgtgtggatgagtattttacagctactgtcctatttccagtccccttcctctggacggctatgggatgtgctgtggatgccctctcttaggctggaataaaccaccctaccttctcctctgccttgtctccaccaaataaactccttaaggcagggatagagtcttgcactccacgaagaagtattgctgcatcctcagctgtgtaagagtgaccgggcttcttctattccacctgtaatggaactttaggcacgcagagagagatggcaaatttgtgctggctgaaggggtcagcaaatgcatataaggcttcttgtgctccagagagagaatggagtgcagtcagtgagaccctgaggggagaaggaaccaaaagcctgggcagaagggatcgtggaggtgcccagggtcaggagggatgggaagggtgaggaacacaagagatcacctggaggcattagaggagaaggcaggcactggggatggtgccgctgatccaggtggagcaacatcctaggacccgagtgctgggcaggtgcatccgtggagggaagcttctctcctctctcggctcctgctgagagaggcaatcattcccctggcttgccctgcaagagacaggagctctaggtagatctctgctatctagggaatagaatgtgaatatttgaaagttctagaggtcaagtcttaggttccctctcagctcagatcccaaatggtacactctaccctaacccccttttcttgtagctttgctacatggagaggaaaataccttgccagacaccaacagtcccttctcagcacttttgtgtgaagacaactcagaccctaagagaatggggtctaatttgcaggtgccactggaaggcagaggtcacgggagccctggacttcagacaaggtagagggatcctggagacagcacatctggccctggagccctgcccacccggggagtgagggcagctctcctgctctcctaggaggcctgcccgaggacccccatgtcctctatgtgtgggattctgcagtttgcactcacaacccagagccttttacccaactaccctgtttgtaggaatgtgtccaaaataagcatcagacaagtacatgaagatgaatgtgcaaagacgttcataacaggattgtttataatcatgaaaaatgatctgcagatttcctgtctgctgtgcaggatgagttagacggggatgcatccataaaatcactttgccctcatttaaaattatatcatagatctatgtttaatgacatagtaaacggtactcaatgcattaagtgaaaaaagcatatacatatcaggatgtatatgatcaagtttttgttaaatggatgcatgtatgcatgtcagtaactgtctgtgtttgcaaacaaaacgtctagcaagacgtgcatcaaatattaacaatcattatctttggattctggatttattgacttctatttttgactttgccctttgtttttctatgttatctgacacttttacactgagtttatattatttttacaattaaaatatcaatccatcaatctacctccatttgggaagtagtaaaaagtacactgagtttatattattatttttacaattaaaatatcaatccatcaatctacctccatttgggaggtccatttcaactacacaaggaagacaggatagggaggaatagcactaagtatgagtgcctgtgattcagagagggaagcgacttggaattctagcccagctcctccacctgccccctctctaactcttccactctcccatacttgctcccggtgccccagcactcctgggtgcctcctgtcttcccagcacgcacaacccagctgagctttctattagtacccactttacccctgatcttcccgccctccacacctcttgtcactcccagtcactccactgatttttatttttttatttattgatgtcatcaccatctgaatcaacgatgtctgtttctttgcctgctcacttacagttggccttgtttactactgtgggaagctaatggtgtctactgtagccaaatcagcacatttatttatttatttatttatttatttatttatttatttggagaccaagtctcactctgtcgcccaggctggactgcagtgccgtgatcttggctctctgcaacctccgcctcccaggttcaagtgattctcatgcctcagactcctggtgggactgcaggtgtgagccaccacacccggctaatttttgtatttttagtaatgacgggctttcaccatgttggccaggctggtctcgaactcctgatctcaggtgatccacctgcctcggcctcccaaagtgttgggattacagacgtgagccactgagcccagcctatttattatttattttattttattttatttttttgagacggggtcttgctctgtctcccaggccagagtgcagtggtgcaatcatagctcactgcagccttgaactcctgggctcaagcactcctcctgtctctgcctcccaaatagctgggactacagatgtgtaccaccacacctggctgtaatcagcacctttaaagaacctaaagatggactcctgcccatcccaccccatgaaatctacatctgaatattagagaaactccaagggagttctcagttttcccatatcttctctgctcacacctgtgtccccacaacagcatacatcttgtccactgtatgtactcggtgaataagtaacaatcgaattgatagataagtggatgcatgtctcctgagccttggggaagaaaagagaagacagaagagggctacattagagaggaaagtttttaggccactgggcaggtacaaacaaggccaggcacggtggctcacacctgtaatcccagtactttggtaggctgaggtggacagatcacctgaggtcaggagtttaagaccagcctggccaacatggtgaaaccccatctctaccaaaaatacaaaaattagtcgggggtggtggcacgtgcctgtagtcccagctactcgggaggctgaggcaggagaatcacttgaacctgggaggcagaggttgcagagagcgaagatcgcaccactgaactccagcctgggcaacagagtgagactctgtttcaaaagaaagcaacaacaacaaaaaacaagagcaggtgagtatcaatgagaagaaacccctatccccagcagttggtgagttgagaatcatgccaaggaggacactcggaacagccaggtcagaaagcagcagcccctggtgatggcctggcccgcccagacagtgaatgccgttttctaaacctggtgagatgataaaattttaacctgctatgtaaagctatttttaaacatggaggggaaaaaaataacctttccctgggtaaaaccgtaacagtcacttagagcacaatggatctttattttttatgaccaagttataaattgttgaaaataagagtttcaaatggaaatgttgacataataatcttatctatagcagcatgaataaccaactataaccgttattattctgtgttctatgaacgttggcttttttgaaagttcaacttgctcaatatgtttgccttttaacatgagttaagaggtaatttgcatgaacacaaataaagaagtatcaattcagtggcattatgaattaattagctgcagcccaccatcatgaattgggaaatgcaaccgcactttccatctcttttatttatagcccactcttgctacgttacaccttttcagatattaagtactgaacatggttgcttcttaaaaaggttaattatccaagacaggtttatggtaccttatctaaaggccaatattctacttctttgggatcttggatttacataattacaatcagtggaaagtttatcagtcagatttcctttcccaccactcctcagcaggcacctttgtcctcttgagatctaccagtactgggggtctccaccagctggtctttgtttcttactccggcaaagcaacattgacagcttgcaacagccaactttccttgccttaaatgtgaggcacatggaatgaccacatgagcaaggcaggctgaatccagcccaaagcctgcagcacctggagcagagctcaccagtggaggctgtgcgcaaaatcaggcccagagccatggtttctttggcctgtaaagtgttaaaaaatgagattggtgggggaggagccaagatggacgaataggaacagctccggtctacagctcccagcgtgagcgacgcagaagacgggtgatttctgcatttccatctgaggtaccaggttcatctcactagggagtgccagacagtgggtgcaggttggtgggtgcacgcaccgtgcgcgagccgaagcagggcaaggcattgcctcactcgggaagcgcagggggtcagggagttccctttcctagtcaaagaaaggagtgacagacggcacctggaagatcgggtcactcccacccgaatactgcacttttccaacgggcttaaaaaacggcgcatcaggagattatatcccgcacctggctcagagggttctacacccacggagtctcgctgattgctagcacagcagtctgagatcaaactgcaaggtggcagcgaggctgggggaggggtgcccaccattgcccaggcttgcttaggtaaacaaagcagccaggaagctccaactgggtggagcccaccacagctcaaggaggcctgcctgcctctgtaggctccacctctgggggcagggcacagacaaaaagacagcagtaacttctgcagatttaactgtccctgtatgacagctttgaagagagcagtggttctcccagcatgcagctggagatctgagaacgggcagactgcctcctcaagtgggtccctgacccctgacccccgagcagcctaactgggaggcaccccctagcaggggcagactgacacctcacacggccaggtaccccaacagacctgcagctgagggtcctgtctgttagaaggaaaactaacaaacagaaaggacatccacaccaaatacccatctgtacatcaccatcatcaaagaccaaaagtagataaaaccacaaaatggggaaaaaacagagcagaaaaactggaaactctaaaaagcagagcacctctcctcctccaaaggaacacagttcctcaccagaaacggaacaaagctgaacagagaatgactttgacgagctgagagaagaaggcttcagacgatcaaattactccgagctacaggaggacattcaaaccaaaggcaaagaagttgaaaactttgaaaaaaatttagaagaatgtacaactagaataaccaatacagagaagtgcttaaaggagctaatggagctgaaaaccaaggctcgagaactacgtgaagaatgaagaagcctcaggagccgatgcgatcaactggaagaaagggtatcagcgatggaagatgaaatgaatgaaatgaagcgagaagggaagttcagagaaaaaagaataaaaagaaacgagcaaagcctccaagaaatatgggactatgtgtaaagaccaaatctacgtctgattggtgtacctgaaagtgatggggagaatggaaccaagttggaaaacactctgcaggatattatccaggagaacttccccaatctagcaaggcaggccaacattcagattcaggaaatacagagaacgccacaaagatactcctagagaagagcaactccaagacacataattgtcagattcaccaagttgaaatgaaggaaaaaatgttaagggcagccagagagaaaggtcgggttaccctcaaagggaagcccatcagactaacagcagctctctcggcagaaactctacaagccagaagagagtgggggccaatattcaacattcttgaagaaaagaattttcaacccagaatttcatatccagccaaactaagcttcataagtgaaggagaaataaaatactttacagacaagcaaatgcggagagattttgtcaccaccaggcctgccctaaaagagctcctgaaggaagcgctaaacatggaaaggaacaaccggtaccagccactgcaaaatcatgccaaaatgtaaagaccatcgagactaggaagaaactgtatcaactaacgagcaaaataaccagctaacatcataatgacaggatcaaattcacacataaccatattaactttaaatgtaaatggactaaatgctccaattaaaagacaccaactggcaaattggataaagagtcaagacccatcagtgtgctgtattcaggaaacccatctcacgtgcagagacacacataggctcaaaataaagggatggaggaagatctaccaagcaaatggaaaacaaaaaaaggcaggggttgcaatcctagtctctgataaaatagactttaaaccaacaaagatcaaaagagacaaagaaggccattacataatggtaaagggatcaattcaacaagaagaactaactatcctaaatatatatgcacccaatacaggagcactgagattcataaaacaagtcctgagtgacctacaaagagactcagactcctacacaataataatgggagactttaacaccccactgtcaacattagacagatcaacgagacagaaagtcaacaaggatacccaggaattgaactcagctctgcaccaagcagacctaatagacatctacagaactctccaccccaaatcaacagaatatacatttttttcagcaccacaacacacctattccaaaattgaccacatacttggaagtaaagctctcctcagcaaatgtaaaagaacagaaattataacaaactatctctcagaccacagtgcaataaaattagaactcaggattaagaatctcactcaaaaccgctcaactacatggaaactgaacaacttgctcctgaatgactactgggtacataacgaaatgaaggcagaaataaagatgttctttgaaaccaatgagaacaaagacacaacataccagaatctctgggacacattcaaagcagtgtgcagagggaaatttatagcactaaatgcccacaagagaaagcaggaaagatctaaaattgacaccctaacatcacaattaaaagaactagaaaagcaagagcaaacacattcaaaagctagcagaaggcaagaaataactaaaatcagagcagaactgaaggaaatagagacacaaaaaacccttcaaaaaattaatgaatccaggagctggttctttgaaaggatcaacaaaattgatagaccactagcaagactaatgaagaaaaaaagagagaagaatcaaatagatgcaataaaaaatgataaaggggatatcaccaccaatcccacagaaatacaaactaccatcagagaatactataaacacctctacgcaaataaactagaacatctagaagaaatggataaattcctcaacacatacactctcccaagacaaaaccaggaagaagttgaatctctgaatagaccaataacaggatctgaaattgtggcaataatcaatagcttactgaccaaaaagagtccaggaccagatggattcacagccgaattctaccagaggtacaaggaggaactggtaccattccttctgaaactattccaatcaatagaaaaagagggaatcctccctaactcattttatgaggccagcatcatcctgataccaaagccaggcacagacacaaccaaaaaagagaattttagacaaatatccttgatgaacattgatgtaaaaatcctcaataaaatactggcaaacagaatccagcagcacatcaaaaagcttatccaccatgatcaagtgggcttcatccctgggatgcaaggctggttcaatatacgcaaatcaataaatgtaatccagcatataaacagagccaaagacaaaaaccacatgattatctcaatagatgcagaaaaagcctttgacaaaattcaacaacccttcatgctaaaaactctcaataaattaggtattgatggtacgtatttcaaaataataagagctatctatgacaaacccacagccaatatcatactgaatgggcaaaaactggaagcattccctttgaaaactggcacaagacagggatgccctctctcaccgctcctattcaacatagtgttggaagttctggccagggcaatcaggcaggagaaggaaataaagggtattcaattaggaaaagaggaagtcaaattgtccctgtttgcagacgacatgattgtttatctagaaaaccccattgtctcagcccaaaatctccttaagctgataagcaacttcagcaaagtctcaggatacaaaatcaatgtacaaaaatcacaagcattcttatacaccaacaacagacaaacagagagccaaatcatgggtgaactcccattcacaattgcttcaaagagaataaaatacctaggaatccaacttacaagggatgtgaaggacctcttcaaggagaactacaaaccactgctcaaggaaataaaagaggacacaaacaaatggaagaacattccatgctcatgggtaggaagaatcaatatcgtgaaaatggccatactgcccaaggtaatttacagattcaatgccatccccatcaagctaccaatgactttcttcacagaattggaaaaaactactttaaagttcatatggaaccaaaaaagagcccgcatcaccaagtcaatcctaagccaaaagaacaaagctggaggcatcacactacctgacttcaaactatactacaaggctacagtaaccaaaacagcatggtactggtaccaaaacagagatatagatcaatggaacagaacagagccctcagaaataatgccgcatatctacaactatctgatctttgacaaacctgagaaaaacaagcaatggggaaaggattccctatttaataaatggtgctgggaaaactggctagccatatgtagaaagctgaaactggatcccttccttacaccttatacaaaaatcaattcaagatggattaaagatttaaacgttagacctaaaaccataaaaaccctagaagaaaacctaggcattaccattcaggacataggcgtgggcaaggacttcatgtccaaaacaccaaaagcaatggcaacaaaagacaaaattgacaaatgggatctaattaagctaaagagcttctgcacagcaaaagaaactaccatcagagtgaacaggcaacctacaacatgggagaaaattttcgcaacctactcatctgacaaagggctaatatccagaatctacaatgaactcaaacaaatttacaagaaaaaaacaaacaaccccatcagaaagtgggcgaaggacatgaacagacacttctcaaaagaagacatttatgcagccaaaaaacacatgaagaaatgctcatcatcactggccatcagagaaatgcaaatcaaaaccactatgagatatcatctcacaccagttagaatggcaatcattaaaaagtcaggaaacaacaggtgctggagaggatgcggagaaataggaacacttttacactgttggtgggactgtaaactggttcatccattgtggaagtcagtgtggcgattcctcagggatctagaactagaaataccatttgatccagccatcccattactgggtatatacccaaatgagtataaatcatgctgctataaagacacatgcacacgtatgtttattgcggcactattcacaatagcaaagacttggaaccaacccaaatgtccaacaatgatagactggattaagaaaatgtggcacatatacaccatggaatactatgcagccataaaaaatgatgagttcatgtcctttgtagggacatggatgaaattggaaatcatcattctcagtaaactatcgcaaagacaagaaaccaaacaccgcatattctcactcataggtgggaattgaacaatgagaacacatggacacaggaaggggaacatcacactctggggactgctgtcgcttgaggggatgggggagggatagcattgggagttatacctaatgctagatgacgagttagtgggtgcagcacaccagtatggcacatgtatacatatgtaactaacctgcacattgtgcacatgtaccctaaaacttaaagtataaaaataaataaataaataaataaaatgggattgtatgcctataatcctagctattcaggatgttgaggcaggaggatctcttgaggtcaggagtctggctatgttgcccaggctggtctacatagccagactccatctctacaaaaaaatttttttaaaaaattagctgggtgtggtggcatggatctgtaatcccagctacttgggaggctgaggcaggggaatcgattgagcctgggagatcaaggctgcagtgagctataattgcaccactgcactccagcctgggtgacagagcaagactctgtctcaaaaaaaaaaaaaaacacaaacaaaaacggaattgtcaaccagtatttgaaaatttggaggttacacacacacacatgcacacaccacacagacaatcagattgtcagaccataacagctgcactcctaggcagcaaccatgaggagtgatgtggagaccccggtttagacagggcctgagttctgcagcttctccgtggttgctcccagctcccattgtcttctagaacacgaagctgaggactggttgtgatttatccctcaatattgggtgcattgaaaactgtatggtacctgcctggcccttgtaactggaggagacatttacacaagggcagggctgcacctggggtagggagggacagggagggagaggagtacaagacaccacatgggggcatggaagaaggcaggctccggggttggtgcccccaatccaggtagagtgagtacgcctggcacctaagtgctaggcagatgcatctgtggagggagactttgctcccctcttggctactgcagggagagaggtaggaggagacctccctggaaggtgctccaggggaccagtttgcaaatccaagccctgcaaagccaagaaggcaggcctccagcactctattcaaccacctgcagacagtgtgcaaggtgagcaagacagaaggcaggactgcaggaagtaagcaaggaggtgacacagacagtgcctggagctgagagtgagagctgctcatgtgcatgatcagtgagggcctctctgtgatgacagcaggggagcagagaccagaacaagatggcccaggaagagctggggtagatgttcaaaggccctcatatgggcttaaaggcggtaccacctaggctctgcggagacgctggggtgatgggtatgagtgagctagcctaaggtgagaggggaaagcctgcaagagcttgatcagctagtgtttttctctttctctttttcttttcttttcttttttttttagagacaggttctcgctgtattgtccaggctggagtgcagtggctgttcccaggaaccatcccactgctgatcagcatgggaattttgaacttctctgtttccaacctgggcagtttcatccctccttaggcaacctgagggttctgcactcctgagaggtcattatttgggggctaaacttagtgcagacacccgactggcacagcgcattatagccccaaacttctgggctcaagccatcctcccaccttgcctcccgagtagctggactacagtgtgcaccactgcacccagcaagggcaatgttttttgcactgtgaagacccattattagatcgtaagatccattcattggatcttaaccagtatttaaaaaataaaaataaaaataatacatcataaaacagcatagaatagtggagaaaatacaaatgcattgcccgtaggaagggtgagcttgctttgtgagcctttatttcagttttacgtatgcacatgcacacacactgggtctggacttcgagtgccaggctgcagatgcctttaccttgctgaggccccccagctgcccacctgaaggaaatcagataagtgaagctgatgcgatgtgatcccttaaaagtcaggtggaacattcaggaggccctgagctaaacattgccagcagcaaggtcacaactgccagaacagccaaggccactcctgctcagcacagagaaggcagccaagcagatttcttggagcagctgccaagagagtctgcccagtgtgatggagaaagagccccacgtgtggagcacctgccaggtgccaggcactgcgcatcccgatctctgggtgagctgtgctccaagggccaagtccatgtcagtgttgccataagagatgccccaggcccagcaggcagtgcatgctccccacccccaccatgagctgagtgtttctggtcctcacatcagccctgcaaggtagatcttatgatctttgtgtcaggggtgaaaaactcaggcacagtgttcagtgactagctgaaggggcagagccagaattcgaacccaagtgagcctgacaccagggcctaggttttctcttccatgacacagttctcaccacactgagagtcagaggaggcacaggtcctctcctggggcttccagaagaatactgcttacaagaaaaaacaattataggaaaaataaggtgtgagggatactacggacacagctctgcattggctgggagagggacagatcaaaagccttctagcaaatatcaactccatgaggacaggcactgtgtctgccctgccttccaccaatccccagctttcaatacagcacctagaacatggtagctcagtaagtatctggtggatgggtagatggatagatggatggataaatggatagatgaatggatggatgaatgaatagatggataggtgagtggatacatggacggatggatgaatgatcactgtatggataggtgaatggatacatggatggatgaattgatggatgcatgggtgtatggtggacggatggataacagcggactggatagatggatgaattgatgaatacatacatggatggatggatggatgcatggaaagagatctgtgttgttggtctataccttccaatggctcatttgttagcaggccacattctctttattggcctcaattctgcacctgtagcctgagggcctgagttcagactgtattcagggagctttcatgggtgccatcagaggtctcccggacaatcctgctagactggctcctccctccattcccacccctatccctagaaaagcacagaatgccaaggctgcccagttgtgcacctgaggcagcccagttgggcatctctaagaatgtatgtagattatgaatgtgactgaccccatcctgggtgctgcagctttgaactaacacttaaaaaacaaaaaaaagaacacacacacacaaacacacaaacacacacattctggagtgagcttggcaaactgcttctgagcccttcctgtgtgggtagagagcacagtaattaaatggactggttctggagccagacttcctgggctcatctccttcgtggcagtgagaccaggcactggattctctgaggtttcacttatcctctgttaaatgggatagcacctgcctctccaggtcactgtgagggtcagacgctccccttagcggggactttccatatcactggggtttaccaacaggtcggtaaactctgtcacagtggcagggcttctcaagtccaagttcagcactaccccccagaaacaggtgagatatccttttcctgggtttacagtgtcctggagctttgtgaaggggctggtgtatcacatgaggtaatgatctgggactggatggactcccaggacaggtgtgagtgtcacctctgctgggtggccaaggggcacagtgctggacactgacaacatgaagtactcacctctatgcaatgctgactctcaaacccaagcaaatagagtctgcaggtgtgagtggggcatagagctgggtggcctgctgaagaattcactgccttgccatccctgaacacacacacatgtggtttctcccagaccttcgacaggctatagcccctggctttccccagtacgtttcctccttacatagttttcccaggagcctgacacctcactcccacctaactcttcttcctccctgctttcctgagagatattttagccatttctactaccaccattgcctcaaaccctgttctcttcctttcacagggaaccttgccttcttatcctaggagcctaaattattatcaatggaaaaaaatgcttgctagaaggcaaggctggcttacttattacactctactgaaaaatgggagaacaatcacccagtccgacaaaggaagggggacaatgacacttgtatggcactcactagataggctccatagcatattttctttttacttttttgagacaaggtctcactctgttgcccaggctggagtgcagtggtgcaacctgggctcactgcaacctccatctcaagactcaagtgatcctcccatctcagcctcctgagaagctgggaccacaggcatgtgccaccatgcctggctaatttcttgcattttttgtagagatggggtgttgccatttttcccaagctggccttgaactccttggctcaagcaatccatcctctttggcctcctaaagtgctgagattacaggcatgagccactgtgctcagcctagcatattttaagtgaaagaaaatagtagtaaacttgaagacagatcaatagaaattaattcagtcttaggtacatacacaaaaaaggttttaaaaataaaaatactttcagagatgtgtgagactatagtgtgtggtctgaaatgcaggtcattagaatcccagaatgagaggagcaacagaaaaggaaagaaaaaaatatttagagaaagaatagcctcaaaagctccaatttctgttgaaaaaattaacttacagatgcaagaactcgataaaccccaagtataataaaactaaagaaaattctactggatatataatactcaacattcagaaagccaaagaaagataaaattttgaaaacattcagccaaagtgactccagaagaaaaccagtaagaataatcactgatttcttatcatgagctatggatgccaaaagaaatagaaacaatataattcaagtactgtagggtggaaaagaacagtcaaccaagaatactatattcagataaaatatgcctcaaaaatgaaggttaaatagagacacttttagaaaacaaatactgtgataatttgttaccaccaacagacctgcactacaaaaaaagtaaaggaggtcctttaagctgaagaaataaagagctctgaaaatagtggatatgttcataaatacaaaggaccatttgtttaattttcttcttttaaaaatatgattgtttaaagcaaaaattgtaatactgcacaaatgggtttataatgtgtgtgtgtgtatatatatatataaaaataacactaaaaatagggtggcaaatggaaacatactatttcaagtttcctatattttgtgtaaagtaagttgatattaaccataagtagaatgggttaagttaaaggtagctatagtaatcctattaggaaccactaaaaacataaggcaaatatgtatattttggagacagggtctcactctgttgcccaggctacagatgtgtgccaccatgcctggaggttttttttttttttttttgtagagatgaggccttgctgtgttgctaggctggtctaaagcagtccttctgcttccacctcccaaaatactgggcttacaggtatgaatgcctctcctgcaaaatatatagatagaaagccaataaggaatttagatgaaatactaaaatattttaacaaaaaagaagaccagaaagtaagaacaaggggagaacaacaccaaatagattaggcaaatagaaaataaatagaaaaatggcaaactttgatacaccatgtcaataattacattaaatgtataaagaatattcacttcaatcaaaaggcagagatttttaagggttggataaaaagcaagaattggccagacacagtggcttatgtctgtaattccagcattttggaggttgaggcaggaggactgcttaagccccaaaatgtcagaccagcctggggaacatggtgataccgcaactataccaaaaaaaaaaaaaaaaaaaaaaaaggtggaggtatcgcttgagcctggaagtttgaggctacagtgagccatgttcacgtcattgcactccagactgggtgacagagaaagaatcctgtctcaaaaagaaaaaaaagaaaaagaaaaagcaagaatcaagtatatgctctttacaatagacacaatttaaattcaaatacaagaaaaatatattgaaagaaaaatatgcaaaaaaaatgcaaaatgtaaacatacaaaagctgaagtggtcataataatattagtcaaaatagatttcaaaacaagtgctattattactagaggggaagaagaactttgcattactacaaaagagtcaggccaggcgtggtgactcttgcctgcaatcccagcactttgggaggctgaggtgggcagatcaccaggtcaggagatcgagaccatcctggctaacatggtgaaaccgcgtctctactaaaaatacaaaaaattagccgggcgtggtggcgggcgcctgtggtcccagctactcgggaggctgagacaggagaatggtgtgaacccaggggcagagctggccgtgagctgatgtcgtgccactgcactccagcctgggcgacagagtgagactctatctcaaaaataaaaataaattaaaaaatttaaaaaagagtcaatacaatcaggaagatatggcatttataaaggtgtaggtgcctaataacagatcttccaaatacatgcataaaaattgacaaaattaaaaagcaaaatagacaaagccacagtcatagtaagagacgttagtgcacctctctcagggggcaaagagaactactagacaagaaaccagtaaaagtatggaatgtctgaagaacattatcaaccaccttcacctacttgacattgatagaaccctacaccaaacaactgcagaacacattcatttcaagtgcaaatggatgtgcatctagtagatcatacactatgtcatcaaacaaattcaatagatttctaaagaatgaaatcttacaaagtatgtcctctgaccacaaagaaagtaaattataaatcctagcagaattcagtcagtagcagaaatctcaccccgtctagtatcctgagaaacttttgaggaaaatctcctctctgcagcttttcagtaagcactgaactggggaagttcaaaaataaatttttcttttaaaaataactatcctgtttccactctgataagcacatgagcaaccattcctcactttgagctgatggcagaaaatgcaactccagctggagttagcaaaaaataaatgcattagctcatgtgaacagaaaaccccagcatgaggatatggtctcaccctcagcctcccctcagcctcccagctctactttattctgtgtggactccctcttgagcaatgtcttctatggcaggatggccacgttcatcttcatgtctggcagaaacagagctagtgttttccaagaggcacagcttttcgttatcactgtttctgattggctaagtctagatcacatgaccactcttgactctgaggttggcatcaatcattccactcactgcaagggttgatagtgagttggtggtttcccagagggacactgaggttgagaagagagaatgaactgagcaggcaatgacagcagatgtgcactccctgcacccactgggtttaaagatggtggagcaggaggtagggagaaatgtggagggatctgatgggcagatgaaatcccagcaggtcagaacttaccccagaacctagcttaacccccctgtctttccagacaatggtcacttccaggtggggggctgattagtgcatgtgtacacacacacacacacacacacacacaacacaaacactcattgttttcattttctttccattttttcacaatgaatacaacttatattatttctgtattgtgttttgaaaacacaaatatttaaggcaaaaacatcctttgggggttggaatcttttttctttttgaggggacatagagtagaattatgaaaagatgcttatcttcaaggtcaaaactgtacactccacaggtgctattacaaacatttagcgagtttctacttttaccctcaaaataggaataacctctcatttaattacctcataagttgtggggaaagccctcaccaaaacgtggagcatttgagatagtgcatgtaaaccagctttctataccgaaggtgttttacagaggagagaaaaggttatctgtatttcaattctggaagccacaggaaagtaacttgtgttactttcagaaacacaagtttctgaagctcctattcagaaaggatctttttccacccttcagagtcacagccttctttcccccaaagggagaagcctttacctgttgtatctctaggctttaaccaccacacaaatagaaataacaattgtagcgtggaacaaacccaagggacagaggcaattaaaaataaatcagacatcttggaaaaagtcatttgcagaaacagttgtgtccacagcatgaaatatggaggaaatacattaaagcaaaaattaatttaataaacactcaccctcattctttttaaaggatcgaatagtataaaatacttcattaggcaaagtctcagcaggggaacatggacttttttaaaaaatgactttgtaagttagagatggaagataaaaaagaagagagagatggggagaacatggcttttgtctgagtgtgcaactttagaatagggcagggaagttcaactatggggagaagatggtcagggtgcttaggaccccctcatatcccaggggtcccatcatgctagaaacacacaaagccagtgagacaatggcagcctccacccagataatccacacacacagaaacacatctgatttaagacccagaaatggcttcaacagtgccatctcctgccctaagctgctctgcacttgctctgggaggtgagtagaaatgctactgaggaaggtaaatcatctgatctcccccaagttgatcccaaggccttgcgcggtgctgggggatcagctgatgcccccaaatgcgtgccgattgatgtaatgagcatttgggggtgccaacccagggtcctttttctgttcacttcctactgatacccagctttttcttcaggaatccacctcagctcatggcccgacccagaattccagattggggcttttagtggctgaaataaattcaggtattccatttcccagacctggtcattagtttagaggtgacccttctgcaatgttgagacaggaacactcaccaactggattctgtgatgtgcaggcaggaaacctaaaattgtgggaacaactatggctgcaaaaagggaagtcagcccagggccaaagccagcacacacagaaggacccagagggagatcaagcaaaatagggcaccctgatcatgccattcctgaagctgtgctttccttgatttccaacagtttattccagtaggaataaatcttgcttgttttataggctggttggaatttggcagcagtttgatgtttgcatgttaagagttctgacactgagcaggttggagaatgagaaagagcaagacaagagaaaggaagggagagggaaattaagaaagggaagcaaggagaaaagagagggaagaaaggaggaaagaaaggaaaagaaaggagaaaaggagagggaaattaagaaagagaataaatgagaagaggcaaatcataataataataatccagaagaataaaagatttttagggcagtatggggttgtgtagactgatatgtccagctctcatattatggatgagaaaatagaggtcccaagaagcaacgtgactctgccagggccacaccatcagtgtgacccagcatgaggacccaagcgtcccggcacccagcctccttctttcttcccccaagtcacaaatatagagaagcagtttttatagctaaagtagttcttgcttattacagagaatttgagatgtgcacagaagtagaaaaaagaaaaaagccataatgttaccatgcagatataaccattattaacatttaaccaattttcctgtcagtattcttctgtatttaaggatcatttttacagagttttaaaccctcagtttacataattgtattccctgcttttttctcttatgtcgtaagcattccccatgttactgcatattcttcaggaacaaaaatgtttgactctataatattcaatcaggcagatagaccctcatttatttaaccgttttcctaccagttttcctaccagtggatatatttttcaaattttcaacacttactttcaaaacgcttgaagatcctcacataaaacttttttgtatgtaagattatttacttataattgattcacagaagtgaaatcttagggttgaagggcaggaattagggttgccacatttagcagctaaaaatgtaggatttaaatttttcatttcaaattatttatctgcaattgaaatttaactgggagttctgtattttatctggcaaccttagcaggaatatttttaaaggtttccatacatatttccaatgccctcagattagaaaagagagagaatgagggaataacatctaacattctattttgtgccatgcactcatttaaatattttatggccatttaagtgcatttaagctttgtgttgacctctaagttaaggaattattgtgagccctactttgcagatgaaaaagcagaggtcgacgaggttaagtaaaatgttcaagactacacaactaggactccgggggaactagaattgaacccgggcagcctgactgctacagtgtccccagaaagccaaggaaagagtgaaacaggccgagagaggagattcaggctgtgactcttgagagaagcagacatccacggtccgtcttgcccgggtccccctcgaagtcaaaatcagccatgtgagcagtctttcccgactcagagaccccaaatcctcaccacacattagcaggatattgatcattcactgaacacattggggcaagacagggatccacgcataatggaaataatttcataaaatccattttaaaactggtcaatcccgtctcgagttcctctccagctgccaggctggtccttcccatctttcagcctccacacccatcactccactcagctaaaacaccccctctaccacctagacctgccctccctggaaaggagaggttatacttaatgaatctccctgtttttcaaaatatcagacagtaagggactttattccttccttcttccctgtctcccatacatttccttcctttcacttcctcccttccccatgtgacactcaccaagcaccaagaagatcttcctccacccagaggcaatgaagacatcccaggcaacagccctaggcagaccacagagggtagccaggctcgaaggcttcagacaaagagccgggagggcccagaggggacacagcgctcccacctgggtagcgtgtaagacttcatggcacaggtgccgctgagctgcgcactgaagggctgatagattttgtacaggtagagatggattggaattaggccaggggtgaaagggaagcagggggctgccccttcccagtgagaacattttgaggacgcagtctagggaaagagagagcagggcttgagcctgaagcagactgagttctccagaatccccacgcatacttatcagcaactcctcgtggctgatgccgaaagagtcctgggtgacgccagagctggcttctgggatcttgttgtggggagcatccccacgtggccaggacccccacccattgctgggacaatatacagttgatatgcatggcttcacccaggccatcttttaaatgactcacaaaatgcatctaggattttaaaactgctcataaaaatggatcaatcagcacaaggctgaaataactagttccttttgctaggaaaaagaaaatgtgcttcttaattattgtactgattgcgtgaaagtttttttttaaatgcaacaaagaggcctctgaaggccctgtccttctacctgcctatagggtaaagaatctaattaaaacaaagaaaatagatgaatatttaatgatatgattttcccccactactttttacttctcaacttaacccagtgacagctccaaaaattcctccaacaaagaacacgcaaaatcccacgagcgtgatctatcagagcagagtttgcataaacagctctgtgcttcagagctgacgccacaactcctccctcaagccagccatggctgctgcttccacagccctctgagggtgccctggcctcctgtcctaaacatcccgggccttcagagctgcctgcccctgaggtcggtcctgacactgcccctttgttatgaggaccttgggaaagtggcccaagcacagcggcactgcctacgggttgccagaaggatgccactggaccaggtaaggaagcacttagcggagtgcctgacacagagcagccactcagccaatgactggacggcatctgtgactgtaacacacttggagactaaggtccaggggtgagggagggtgatttttcagaagtcacagacagattggtggtagagccattgtgaattactcctccctgtattctgagttacctcccatgtgttggcctccagtgctggctgtattctctgccactagtagaatggtccttcttgcctggacttctgcgctggtcactttgggctacacaaatgcctgtagctctcctcgggacctaccttcatcctattctagaatgggtaggtatccttttatatctgctaaattacttttgattctaagagacagaaagtttaagcacactgacttaagcctaaaggggacttcatcactgaaataccctagggtagaacttcagtttcatagctggatccaggggctggactgatgtccccagagcttggcttctccctctggcttctctctcctgcagcctccattttcagataagctgtcctctaggggttgcaggatggttcttgaagctctcacctctcatctaagcaagtaagcaagccccacccccccgcataggactcccaaaaaaagtttcatcatagcttattgactcaggtaaagtgggcaacatgcccattcctgaaccaatctccatgtccagagacatgtgatggaagactggcagggctatttcctctgagttcctgtgagtatcattagtgcctctactcatgagtctcccaggaggaggaaagggtgggttgttcagtagttttcttagccagaacaaattttcactaataaatctgtacttctgcgctggagaacagtgaaatgtgagtgcaggcagtgatcacacaaggagactaacacatcaaattcagccctccgatggacggagagtaactgcactggatcttcgaatgtggattcattgtcagcatgaaatattggcagagttcccatagacattctggttcccagcttccttggtaaaattgggttgcggccagagaggcatgtccctagctttgccctgctagtctttacagcaggctacagaacctgccttcactgctctcagttactgcctgggtgctgtggccggctaagtttgcaacccctggtggaagtccactcagtgttcataagaattcccctcaatctagagcactgttcagagtgagtgcctccttgcagctgagccctcacaccaggaatgccacttctcccatctccaaagagtgtcacagcaggcctgggaggcagatgggctgtttgggggaaggaagctgaagactgatgaggtcgaaggataccgaggtagaaacaagtgttaacctgtgtagcccaggcagtgggaggtagaagaggagggctttcctcagaccctatccctgggcctaaaatggaagaaactcagatatagggccctatgaagtccaaacggggagcaattaaaaggtgcacggggccaggagcagtggctcacgcctgtaatcccaacactttgggaggctgaggtaggcagatcacttgaggtcaggagttcaagaccagcctggcgaacgtggtgaaaccccttctctacaaaaatacaaaaattagctgggtgtggtggtgggcgcctgtaattccagctacttgggagactgaggcagagaattgcttgaacctgggaggcggaggttgcagtgggctgagatcgtgccactgcattccagcctgggcaacagagcaagacagtctcaaaaaaaaaaaaaaaaaaagaccgtggtcagcatcttctgtctctccaccttccccatctccctgcctagcgggaggacaggagcagcaccaggatggcagacatgacacctaggctgctgggcagtttcaccttccctccatccacacctttccccacaaccctgggggtcccctgaaaatccgtttctcaggctgacagctgttctgtaggtgtgggatgggggctggtgttcaggtaagccaacccagatgacagcaagacagacaactttctcaaaagtaaaatacagccaggcgtgatggctcacacctgtaatcccagcacttcagtaggccaaggcaggaggattgcttgaggccaggagttctaagcctgggcaaatagcaagaccaccaaatttttaaaaaattagctggacatggtggcatgtgcctgttccagctatttgggaggctgagcaggaggatcacttgagtccaggagtgggttatggtcgcaccactgcactccagcccgggtaacaagggaagactgtctctaaattaaaaaaaaaaaaaaaagtaatcaatttccctcttgtggtggcatctcactcccacatacaccctaaatctgccccttcctctccacctgttttgccttcagcctagacctagccccatcattcttacctggacagctgctccttctttttaactattatggttatttttagagacagagtctcatgctgtcactcaggctggagcacagtggtgcaatcacggctcattgctagctcaatctcctgggctcaagcaatcctcccacctcggcctcccaagtaactgggaccacaggcacgaaccactgtgcctggccagctcctttctttctcctggactcccgccagccactcttgccctgccacacacccacaacctgcttaaaatctgcaaatggcttctgatttcacagggataaaatccttactatttgcagaggcctaagaggcctttagtgatgcatctcccttcatttttgccgctcctgccccatgtcagatgctgggggtgcctcaccccttccacctgtcctttgctgaggggcagtgccctgctccacgctccaccctgtggcctagaactgcacctgtcacagagtgggtgccaaatgaaggaataaatgcatgaatgcatgaatgaatgaacatggtttggaaacaatttgagcagtctgaacttctgtttatcagtaaagacaagtatttttgaatccctatagacctcatttaaaaatttagcttgggtacaaggatggtgcggagaaacgggaaagttggcattattttacagtttatttaattctctcctcctgctggcactaatttaattcatctccatagctaacggaaggacggaactgaaatattaacctcaaaggcggtgcggaagcagataatggggctgtgcctgcaagcacagagtagaaagataaaagagagggacggctgcttccaggggagaattatgcggggagagaagtatagaagccttttttctaatggttcatttcctttctctttagtccaaagtgataaaagcaaataaatttgtgtttagaatcacagacatagtacaggaccattataaaaagacatcttcccagtgaaactttgtcagaagttcttaatgtcaaaagcgtgcaaagtggattaaaatatcacaggcaagcagcagagattgtcaaaatgacagaagattattaaacctgtatatttatcccttcattttcatctccacatgagaccccagcgtggtgctgtttctgtgtgaagccctcggccacgtggccagctgaatgtgggcggggacccgcctgggcagagcccaagatgccgtcccagctccccggcctctggcttgaacagagtccaatctaagagtcagaatacacagagaaagtggcccttctgcctggctgacatttagctgtcattccttccctcctgagggaactcgtgggcagtgacagcagaaaacactgcagggagaaggagcgggagtgcagggccagctgtgagattggcatggggtgactccttctgtctgcagggtccctggggaaagaagagcaggtgggcgcctcgaggctcctttctctctgggtgagttctagcagctaccaccgatggggagtatcctctgtgcctggctgtgtacctgggctttggacgcattctctcatttatcctcatcacagcccctgaggagggggctgttgtcctccccatttgacagatgagaaaaccatggattagaggccaagaacttggccagggtctgcagctgacacctgatggcgctaggttacagcccagctctgcccgattccaaaacaaagcaatccctccgtggtgccccctctaaggcagctccaggggtaaaaagcatgtagtcactgtggacgcatagatagggatacagaaagctcttcaggacagcatgtccagggcacaggcagctgcagagcagtggctccaggctggaagagctcaatacgtctgcattggcttataacagctctggaaaggtgctcggtgggaacaggtgggccagcagttgggagctgggggatggaggcaggaagggaagcgagaccttcatttcactgttgaccctattgtgctgtttgaatttgtctttctgtgtgcatggatttgaaaacacatatggtaaaacaacatgaaaagtagcttggctagatggaaaaagaagcctgggagttcgcctcctcacctgacctctccctattgcacacacaccttgcttccatctgccaggctggggttgcccaggcccctgcctcatttctgagccaggatctcctcagggctctttccctcttcactcgactgcctgctctcctctccctttcagcacaagtcttgctcctcttcagcctcagctctatttctgcctcctccaggcagtctttcctgactacccaaagccctctgtcctctctcaagatggtgcccagcaaagaaaactttcctgtccatagcccagactcacagcctcactggtatggtttggatctgtgtccccatctaaatctgatgttcacttgtgatccccagagttggaggtggggcctggtgggaggtgattagatcatgagggtggtttctaatggattagcaccatccccctagtgctgctctcatgatagagttctcacgagatctggtcatttaaaagtgtagctcctttcccctctctctctccctcctgctctggccaggtaagacgtgcctgcttcccttttaccttcagctgtgcgccatgattgaaagcttcccaacgcctcccaagaagccgtcacacttcttatacagcctgtggaactctgagtcagttaaacatctcttctttattaattgcttgtctcagatgttttttcttcctgtttttctttattattattattattattatactttaagttctagggtacatgtgcacaacttgcagatttgatacataggtatacatgtgccatgttggtttgctgcacccatcaactcaccatttacattaggtatttctcctaatgctatccctcccgctctgcccaccccacgacaggccctggtatgtgatgttacccgccctgtgtccaagtgatctcattcttcaatttccacttgtgagtgagaacatgtggtgtttggttttctgtccttgtgatactttgctgagaatgatggtttccagcttcatccatgtccctgcaaaggacatgaattcatccttttttatggctgcatagtattcctggtgtatatgtgccacattttcttaatccagtccatcattgatggacatttgggttggttccaagtctttgctattgtgaatagtgctgcaataaacacatgtatgcacgtgtctttatagtagcatgatttataatcctttgggtacatacccagtaatgggattgctggatcaaatggtaattctagttctagatcctggaggaatcgccccactgtcttccacaatggttgaactaatttacactcccaccaacagtgtaaaagtgttcctatttcttcacatcctctccagcgtctgttgtttcctgactttttaatgattgtcattctaagtggcatgagatggtatctcattgtggttttgatttgcatttctctgatgtccagtgatgatgagcattttttcatgtgtctgttgggctgcatagatgtcttctttttagaagtgtctgttcatatcctttgcccactttttgatggggttgtttgttttttcttgtaaatttgtttgcattctttgtagattcttgatattagccctttgtcagatgggtagattacaaaaattttctcccattctgtaggtttcctgttcactctgatggtagtttcttttgccatgcagaagctctttagtctaattagatcccgtttgtcaattttggcttttgttgccattgcttttggtgttttagtcatgaagtccttgcccatgcctatgtcctgaatggtattgcctaggtcttcttctagggtttttatggttttaggtctaacatttaagtctttaatccatcttgaattaatttttgtataaggtgtaaggaagggatccagtttcagctttctacatatggctagccagttttcccagcaccatttattatatagggaatcttttccccatttcttgtttttgtcaggtttgccaaagatcagatggttgtagatgtgtggtattatttctgaggcctctgttctgttccattggtttatatctctgttttggtaccagtaccatgctgttttggttactgtagtatagtttgaagtcaggtagcgtgatgcctcaagctttgctcttttggcttaggattgtcttgacaatgcaggctcttttttggttccatatgaactttaaagtagttttttccaattctgtgaagaaagtcattggtagcttgatagtgatggcattgaatctataaactaccttcggcagtatggccattttcacaatattgattcttcctatccatgagcatggaatattcttccatttgtttgtgtcctcttttattttattgagcagtggtttgtagttctccttgaagaggtccttcacatcccttctaagttgtattcgtaggtattttattctctttgtagcaattgtgaatgggaattcactcatgatttggctctctattattggtgtataggaatgcttgtgatttttgcacattgattttgtatcctgagactttgctgaagttgcttatcagcttaaggagatttggggctgaggcaatgaggttttctaaatatacaatcatatcatctgcaaacggggacaatttgacttcctcatttcctaattgaataccctttatttctttctctcacctgattgccctggccagaacttccaacactatgttgaataggagtggtgagagggggcatccttatcttgtgccagttttcaaagggaaatgcttccaatttttgcccattcagtatgatactggccatgggattgtcataaatagctcttgttattttgagatatgttctatcaatacctagtttattgagagtttttagcatgaagcgctgttgaattttgtcaaaggacttttttgcatctattgagataatcatgtggtttttgtcattggttctgtttatgtgatggattacatttattgatttgtgtatgttgaaccagccttgcatcccagggatgaagccaacttgatcgtggtggataagctttttgatgtgctgctggattctgtttgccagtattttattgaggatttttgcattgatgtccatcagggatattggtctaaaattctctttttttgttgtgtctctgccaggctttggtatcaggatgatgttagcctcataaaatgagttagggaggattccctctttttctattgattggaatagtttcaggaggaatggtaccagctcctctttgtacctctggtagaatttggctgtgaatccatctggtcctggacttacttttgttgataagctattaattattgcctcaatttcagagcttgttattggtctattcagagattcaacttcttcctggttttgtcttgggagggtgtatgtgtccaggaatttatccatttcttctagatattctagtttatttgcttagaggtgtttatagtattctctgatggtagtttgcatttctgtggggtcggtggtgatatcccctttatcattttttattgtgtctatttgattcttccctcttttcttcttcattagtcttgctagcggcctatcaattttgttgatcttttcaaaaaaacagctcctggattcattgattttatgaagggtattttgtgtctctatctctttcagttctactctgatcttagttatttcttgctttctgctagcttttgaatttgtttgctcttgcttctctagttcttttaattgtgatgttagggggttgattttaggtctttcctgctttcttttgtgagcacttagtgctataaatttccctctacacactgctttaaatgtgtcccagagattctggtgcgttgtgtctttgttctcattggtttcaaagaacctctttatttctgccttcatttcgttatttacccagtagtcattcaggagcaagttgttcagtttccatgtagttgtgcaattttgaatgagtttcttaatcctgagttctaatttgattgcactgtggtctgagagacagtttgttgtgatttctgttcttttacatttgctgaggagtgctttacttccaattatgtggtcaattttagaataagtgcgatgtggtgctgagaagaatatatattctgttgatttgcagtggagagttctgtaggtgtttattaggtctgcttgttgcagagctgagttcaagtcctggatatctgtgttaaccttctgtctcattgatctgtctaatattgacagtgggatgttaaagtctcccattattattgtgtggcagtctaagtctcttgtaggtctataagtacttgttttatgaatccgggtgctcctgtattgggtgcatatatatttaggatagttagctcttcttgttgaatttgtaatggccttctttgtttcttttgatctttgttggtttaaagtctgttttatcggagactaggattgcaacccctgcttttttttgctttccatttgcttggtagatcttcctccattcctttattttaagcctatgtgagtctttgcatgtgagatgggtctcctgaatacagcacagtgaggggtcttgactctttatccaatttgccagtctgtgtcttttaactggggcatttagcccatttacatttaaggttaatattgttatgtgtgaatttgatcctgtcattgtgatgttcgctggttattttgctcattagttgatgtagtttcttcatagcatcaatggtctttacaatttggcatgtttttgcagtggctggtactggttgattctttccaggtttagtgcctccttcaggagctcttgtaaggcaggcctggtggtgacaaaatctctcagcatttgcttgtctgtataagattttatttctccttcacttatgaagcttagtttggctggatgtgaaattctgggttgaaaattctcttctttaagaatgttgaatattggtccccactctcttctggcttgtagggtttctgctgagagatcccctgttagtctgatgggcttccctttgtgggtaactcgacctttctctctagctgcccttaacaatttttccttcatttcagccttggtgtatctgacaattacgtgtcttgaggttactcttcttgaggagtatctttgtggtgttctctgtatttcctgaatttgaatgttggcttgccttgctaggttgaggaagttctcctggatagtatcctgaagagtgttttccagcttagttccattctccccatcactttcaggtacaccaatcaaacatagattcggtcttttcacataatcccatattttttggaggctttgtttgtttctttttactcttttttctctaaccttgtcttctcactttatttcattaatttgatcttcaatcactgataccctttcttccacttgatcgaattgggtattgaagcttgtgcatgtgtcatgaagttcttgtgccatggttttcagctccatcaggtcatttaagttcttctctacactgtttattctagttagccattcgtctaatcttttttcaaggtttttggcttccttgcaatgggtttgaacatcctcctttagcttggagaagtttgttattactgaccttctgaagcctacttttgtcaactcatcaaagtcattctccgtccagctttgttccattgctggtgaggagctgtgatcctttgcaggagaagaggtgctctgatttttagaattttcagcttttctgctctggtttctctccatctttgtgtttttatctacctttggtctttgatgttggtgacctacagatggggttttggtgtagatgaccttttgttgatgttgatgcttccttctaacagtcaagtttctcagctgcaggtctgttggagtttgctggaggtacactccagaccctgtttgcctgggtatctgtcggcccctactgggaggtgtctcccagttaggctacatgggggtcagggacccacttgaggaggcagtctgtctgttctcagaaatcaaatgctgtgctggaagaaccactactctcttcagagctgtcagacagggatgtttaagtctgcagaagttgtctgtcttcttttgttcagctatgcccttcccacagaggtagcatctagaggcagtaggccttgttgagctgcggtgggctcctcccagtttgagcttcccagccactttgtttacctactcaagtctcagcaatggcagatgcccctccccaaccaggctgccgccttgcagttcgatctcagactgccaggctagcagtgaggaaggctctatgggcgtgggacttcccgagataatctccttgtctgccggttgctaagaccttgggaaaagtgcagtatttgggcgggcgtgtcgtgtttttcaaggtagtctgtcacagcttcccttggctaggaaagggaaatccaccaaccccttgtgcttcctgggtgaggtgacaccccagcatgcttcagctcaccctccatgggctgcacccactgtccaaccagtcccaatgagaagaacaaggtacctcagttggaaatgcagaaatcacccatcttctgcatcgatcacactaggaactgcagaccggagctgttcctattcagccatcttggaacgcccctccccacccccaccctttttttttttttttttttttttgagatacattttcattctgttgcgcaggctggagtgcagtgacaagatctcggctcactgcaacctctgcctcccgggttcaaacgattcttctgcctcagcctccccagtagctgggattacaagtgcccatcaccatgcctggctaatttttttgtatttttagtggagattgggtttcaccatgttggccaggctggttttgaactcttgacctcaagtgattcacctgccttggccttccaaagtgctaggattataggcctgagccactgcgcccggcatcagatatttcttgatagcaatgcaagaacagactaatacactcaccatccttgggtcagctcataagggcaggccacgttctatccttccttcatcccctcctcagttaattgggaagttcagaagaaacatctgtgttaaggttaactgagcacctgctacccacagaactgaatacgctgagctcgctgtgaagctaagggctgggcctggggctgcgggctattcaggttaggcaaagggaggaggacgggaagggccattttgagggctggctctctgtttagcaagggtgacctaagtagagtcagcgcagggagatccaggtttgcaaggcatgaatcttatacaatctggggatccagtttaagaaaaagagtataatattataaatactaaattttgtatgaaaatgaatttctattatgagaacataaatcacaacaaatattagaggcttagacattcaggccccttttcagatttctttaggcaatttgccagaaatacttttgcagacacattttatgatagcgccctggccctcctccccacccaaagctctgctgaagtcccaagctgccagcagatgagagggtctgatgcttcattaacttcataatcaattcatctctttggagaagatccaccatgccaggctgccttcgtgaagaatgaaaatgacaaatcaacagaaaccagctgtgatccagtgaacccagctcctatgatcccacccagtgccctcctggccctgggaggggcagagcagctcacagcaagcctcagccttgaaaagcagggttagaatccttggcacccaggccagggcctggtgcataggagagactcagcaaaaggtatgtgaatgggtagatgatagagagtagctatagggagaaaccagctgccagggctttacaggagagggggctcagagcctgatggctctacgtgtgcatttaatcaaacatttaagaagaaataatgccaactgtacacctctatgctcactcttctagaaaacagaagagtagaaatggcactctgacccagcttcatgaaactagagtcagatatttggtatcacgtttttttttttttttttttttttttttgaaatggagtctcagtctgtcacccaggctggagtgcagtggcacgatctcggctcactgcaaacttcacctcccaggttctagcaattctcctgctgcagccttccgagtagctgggctcacaggtgtgcaccaccacgcccagctaatttttgtatttttagtagagacggggtttcaccatgttggccaggctggtctcaaactcctgacctcaagcgatctgcccacctctgcctcccaaagtgctgggattacaggtgtgagccaccatgcctgaccggtatcacatatttctgataccaaagccagacagagaaacttcagggaaagaccaatattactcattaaataactatatatgctagaatgtctgaaatgtgaaagtattcactgtctggagaatgtggagcaactggaaatctaagccacagctggtgggatgtaaaacagtgcaatcactttggaaaacagatggacagtttctttaaaaattaaacacacatgaaaaagacatacacgtttcatgtaaacccatgatttcactgttaaatatttatccaatagaaatgaaaacatagggccgggcgtggtgaaacctggccggcatggtgaaaccctgtctctactaaaaatacaaaaattagccgggcgtggtggcaggtgcctgtaatcccagctaatttggaagctgaggcaggagaatggcttgaacctgggaggtggaagttacagtgagccgagatcgtgctattgcactccagcctgggcaacagagtgagactccatcttaaaaaaaaaaaaaagaaatgaaaacatagatgttttcatacaaacacttgtgtgtgaatgttcctaacactttcatttctgcgaaacttgacactgaagtgagcatccatcagtgtgaacagatgaagaagctgtggcatggccatataatggagtgttatccagcaataaaaagtctcaaaataattgtgctcagtgaaaaaagccagacacaaggagtgcagactaattgatgccatttacatgaaattctggagcaggcacgctaatctgcagtgactccaagcatcccagtgtttgcttgaggccaagaatggagggtgagattgtctgcaaaaaaagagaattttgggggtgattaaaatatgctacatctcagttggggggaagtggtcacaggggagtgtttgttaaaacttaaaatgtacaataaagtttattttaaacttgaataaatataaatgaataaaaacacacagtttcaaactctactcctaaatattttgatttaatatttaatgtctgggtagataaagcctaggtattttttataatgctcccctggtgcttctggggtaagacccaggttggtgaaggaattggacataacttttgaaaaggtcaatggagtcaggtcacttctctgctcaaatcttcacaaacacatcccatttccatctttgcaggttcgtctcagaatactctgtgtctctctcactgtgactctgccacctggactctcacccattcctttattgtccccagtggttctgctggttcaggctgcacgttgccctttggcctgcgatgctcttccctgcacagggccgcatgatttctgacattcatggcaccttcctcagcaaggcctcccctgacctctccatctgtggtcaccctccatccccaggctctctcttcatttctttgtttcattttcttcacagtgcttattgctttgtaaaataatctagctgtttcattacttgtgattcaccctctccgtagtttataagctcaatgagagcaggagctttgtctgtcttgttctctgcagtatcttgtcccccaaatggtgcacagtaagtgcttaagaaaatccagctggataaataagctcacagagttgttgtgaggtagtgaaactgaaagattcaccattgaccactgaagaaaaattacagaaaaggttgaataaatcttagaacgtgactacaagcagtgaaggaaatgcagtgcttcattttcttctttcactttctgatattttcctaaatccttgcaaagagcaaaaattgtcatgaactcctatgagtacatctgtccagccaatcagccaccatccgcctctccagaaaccaccatacggattcacagggaggagtccctccaaggcagcccttttataccccatcctccctggacacagctaactggagaagcagcagacaccttgcccttcctgggcaaatcagatcctctgcaggtggctagctaaggtgggaagttagctggctcctcctagtggagggagaaggggctaagaaagtggaatgtcttgcaccagtgggaggggagcagggcaaatgcagaaagcagcaggctagaccacagggctctcctgttccaaggcctgcttagctcaaacacgtcctcaccttagaattccctctcctagaaaccatccattctgttttgttttgttttgttttgtttgttatcttttttgcttgggctcacttgagtgcttctattagttgatacaagaagaattgtaactaatcaaacctccattactgtaataataagaaaaatagtgctataagaattcaatttacatacaaacatttttaatatgagtacgtatttacaaccggaacataaagagaggtccccttgtagtttctattgtgccattcttgacttgcaggttctctctcccctagtccaggatgcccttggaaatgtctgatttccaaaccaaagccagggctgtgggaatgctgatggcgatgtgggtgactgggtcccaggttgtctcagccttgcgtgggagcagccgtccctgaagacaccagtgccccatgcctgctcagcactaatttgagctgtgacaccattttccaagctgtcaccacctccagcaacaacagaacctctctggggggagcagggagggttggtattcaatttccctcctctgcttctcaagagttgagttcccaagttcaaagacatctatcatggtgagtgatggattgtatttcagagcaggttggcagcaggagggaattggatttagaaacaaccatctggcttttgcaactgtgtgccctttggcctgctcagcgtcaagcctgctgtcacacaatctgagtagccctgggagcagacccgaccctcgtgtccagcccagacaggtctctgtgctggagaagtagacagcactcaggaagctagtgaggaccccatggggctgctcatggagggagttggggctgagcacagagatctttttgagagccaactatatgctgggcactggggagacagactgaagaagacaaaatgcctgcccaccagcaacactcattcattcattcattcaaaatcatttagtttttgtgtgtgtgtgtgcctactaggcccaggcattggcaagtttgcttcccactggacaatgggcagctctttgtctctgaaatcgcactgttggggctcagatgccaactccattgccttgtttgttgtgcaacacaggcaagtggtgctgattggcggttgaacatcagcaccttccctctctacagcactgtgtccccccctgctggttgggggtaataataacacccatctatctatggtctctgaaacagtgtcgacagggcacctgtgagtagtaaatgttcactaatattagctggtaatactttttaaatttgcttattagtttttgtttttgctgttaccacttttattgtgtccatgcattctttactcagacacaattctttgaccacctttttaactgacttatcaattggtgtgatatccttacaccatccattttagtagccacagcaatggcagattttaatgcaataactcacactaataaggggtgtccctcttcgcatgtaatctcccttgggtccccataagctggggctctgggtggttccagagtctcacaaatgcaacatctcaatgccatctgtgtggtcagcagcttgacactccggctgcattttccattctgtgagcagattgggaggcagccaaggtgagtatcagcttttaggatacctggggagagactgtgtctcctcactgcttagcaaagagtggaagaacaaccaatcagtaggcagtaggccatgacagcacttgcagctgacaagcagtgtcactctctgtcatgttttcaaaaactctttaggggtagcaagctctagaagacaccaggttatacacgtttagcagaggctgcatgcaggggcaaagaacttgcagtgtgtatgctttggcctttcattgagatgaatcctaaaagtagaaaaaacgccaggcatggtggctcatgcctgtaatcccagcactttggaggccgaggcaggcagataatctgatcacctgaggtccggagctcgagaccagcctgaccaacatggagaaagcccgtctctactaaaaatacaaaattagccaggcgtggtggcgcatacctataatcccagctacttgggagggtgaggcaggagaatcgcttgaacccgggaggcagaggttgcagtgagccgagatcatgccattgcacttcagcctgggcaacaagagtgaaactctgtctcaaaaaaaaaaaaaaaaaaaaaaaaagtagagaaaaataagaaaaagactgggtgcagtggctcacacctgtaatcctagcactttgggtggccgaggagggcagatcacctgagctcaacagttcgagaccagcctgaccaacatggtgaaatgctgtctctgctaaaaatataaaagttagctggccgttatggtgcatgcctgtagtctcagttactcgggaggctgaggcaggagaatcgcttgaacctgggaggtggaggttgaagtgagccgagattgtgccactgcactccagcctggacaacagagagagactctgtttcaaaacaacaagaagaagcaaaaacactttgggaggttatttatcctttaccctcaagggactctcatctgggtagtaaaagaataaaatcgtttgataaaacagtataaaaagatgtttaaaccctagtggtgtgtagttgtgtgtgtacattagtgtgtgtctaacagaggccaagaatgagacaccagccaatgacatcatccacactgaatacagaaatcaccacattagctaacatttatggagtgtttattgtgttccagacactgtactaagtacttctatgtgcattacctcatttaattatcacaacataataatgtatgtaaaacacttaatacctggtgctgagaaggtgctgaatatgaaactgtcaccattactattattaattattattgtttagattatcatccccagtttcccgatgaggaaattgaggctcagggatgcaaaatggccttcccttgttttttaattgcaaaacgatctcaaacttggtgtgtgtgaatgtgtgtacgtgcacaaatctaaggatagaaagaatggaaagtgacctttctcctgcacctttctagcactgagaatgtagtagccactgccattcattcactcactaagtcctatttcgttttcttagctgacagatcaggacacaggaggatggaatataactcaaataacttttccagagtcacggagtgagacaggcgtggagttaaattcttccaaggtgggtgagcatgaacccaaagttctcctccactcagacaattcatcctgtaagactcaagatgctcaactgcagagtggtcatgacatgactcctgcatgctcaaagccacaggagggccagaagaagctatgcatgtggacacctcagtgggaaatcctgtccactgcgtaagcacccaagaaacagttgggtctcctcttttagtgtgaaagtgcagcatctgttcacactgtggggtgagcagtccacagagcagagcccacggttctgcaatccggggctctgccccgtgcccctctctggacacactttggcaaggacatggttccagtccactgctctgtgcccagaggatatctcaagccccacaatcacccaggaaaatggctttagttccagaaccagagagaaaagggaggcttcctggggaaagacaaggacagctagaggttcatttctgcccttggttctcctttctgcacgtcatgtgtaatcctgtctctaaatacctccctggctcagctgggcattctcatgccaactgggatgaagagcagctggttcaggctgtgattggttcctgggacctcttcttcccctactgccaaggctgcagttgccaccaaatgatggtttcccctccccctgacactgcctggagcccagctgacttcacacttcactcctccctcctgctcaccagtgataagaatagcaaccacagcatcaccccaaacccctccagggtgaaggaaggggcagctgtcaccttaagtgtcaactccaggtccttgtgagctatagaatcaggtttgagaaacaccctttggttggggaagtaagcaccagacaccccctgctggctgaaagtggaattcaggttcgtggtcccgctgcagcctgggagagctccctaatcttcatggacatcattatccccattttccagatgaggaaacagacaaagaatttgcccaaggcaccactgctagtcaatgatgccctccaggctaatcccattccaaatctcctttttctttccgagggactgcctaaatatctagatgttccacacccaacctttcaactctcccttcctatgccttttgattcagtaaatgcaccgtttgtattcccttggaaattccactctggaaggagaatcttttgacagaggcgtgctgcatcctgagacgctgagccgatgcaatcactcattatctcattgatgcagggcagaaggtcccctcccttccagcaggccacagaggaattcctcggaggatgcagatgctgcatgtcttgacttccaagccagggaatttctgcctttgtgcctgcacctgtattaattaatcattcttctaacactggctgtgtctacatgcattattctaaaagacaattctattcttaaaaataagctaatttaagccagtgatctgctgctttttcttttttctttttttttttttttttgctaaattttggttttaaaataaaatcaatcttaagaatagagaattcaataaggcaaaattcttgaaagaagcttatcatttattcatttatgtagcatgtatgtgacaagaccaggctagcaatgtagggagtggatcaaatagaactgacagcaaaggcccccagtctaatatgcggaagaaagaaaagacaagctcactgcagaatgcagagaaacacatcacacaggcaaataaaatgttccttgttcccattttcaccccttaacagcaaaaaaaataaatatgcattcatcttacagggcataaaagagaggtctgttcaattgtcaaatctagagaaacttggtggtggaggcagaattcatgcctatgagtttaccatcaattgctgagattattagaacaacacggacatgcttgggagtggagaggggactgagattagcatcaccagggaagtgcaacggtgggtgggttccttcttgtaggggagtgagcaggtgttaattgccattgcttgtgcaatggcatggataaggttaggctagcatttggcatccactatctgtaaagaaagggttttttaatagtcctcacatgtctacagggtgtgacagatttaaattagataagagataaattgttttcagggacaaattaaacaaagcagttaatgatattacaaatcactctcagctgtcattgaagcagtcctctgatgttgtccatgaggcccagttctgtccatctgcaagctgctgtggggccctgagcacagaccttgcagctagaccatgtgggcctttcccaggctctgcgcttcccaggctgtgagcctgtgatcacctcacctcacatcccggaacctcagcgctgcatctgtgaaatggggctagctcccccatctcctcagattgaggtcaacaatgtgatgtcataaaaagtgttcgctaaacacggtcaccactatttaaaaaacaatcacgcaagcttggggtggatgtgatttgtctgtgcaaagggtcgacagtggtggcgtgcaatgatcgcctcacattaccgagtaaggtggctctgccaccatcattcttgttgacttctgggggagggatggagtcccaaagaaaagaaaagaaggtcccagggcctctgggaaagaccacattacatggtgtgggttgtgttcctgaatgtgtccatactggaatgtgggtctctggaggacggatgttcccagtttctctctgcaccactcccaccccactcctaacgcttctccttgactggaaggaaacatggcctcctctctcctcggggttcatctcctatgggggcttccttcctcctggagcctggagagagatgcggggggcaagggttgctcccacttttgagcaagtcctgaattttatctcccaccttggcctgcgtgcaaaggacagggtacctctcatcttagtgttctgcctcctggatgtgcgttggacattccaggctgtctctctgtccacattcatgtaaggccccaacacacagctgcttattctgcagggtgactcctgatcaaggccagactcagcaccactccagattgtgcactgtctggggcagggccctccgtgtcgcctttctgagcccctaacagatctcgttcaaagccggacccataatcaatgctcagagaaagtgttgaacagacacatgccccaaagagtctgagcttcttcacttaaagtttcctgggctctgcctccatcctcagaaatgacccatccatttcaaaaagaggctctccaatgtcaatactgcacctccccaggatccaaatccatttccctgctcctccagcacagcacaattaataaacgtcccactggcttgccattccaggttgggagctcacagcatcccttgaaaccatgctggcagagaatttgtcaccgtcaactcgctgctcctcccgtggtgccacaccccagatgacacagagcatggcctatgcctgtcagcagaccctccactgctgctgttgccagcccccaggtctcatcctccttccagggtcacctttggaaatgctgcccactgagtaagtgcccaagaaacaatcaggtctcctgttttagtgtgaaaatgcaggtctgttcacaccctggggtgagcagttcacaaagcagagcccatggttctgcaatccagggctggctgtgccctgcatccctctctgggttgtgaggttgtgtgggctgtggatccatatcacatgccaaatactcttcctggtgagagggatgcagagatcagcagacacacgccaagacaccaataaactggcagccacctacaatccagagcatgtcagctggtgacaagggctgagaagaacacccagagtggctgcgtggccagggcggcatcctgaagaggagattgccaagcagtgctggaattgtatgagtaagtcagccagggacagtctgaagagtgtgagccaagtaaagggaacagcacacgcaaaggccctgtggcaggaatgtggttggcttggtctggaggcagaggaagctgagtgacaagagtggagtgacaagggggaagagagaggcagaggctagaacaggtagggcctgtgagccatgggatgagcttctctaaaattcagccccctgaattttagattcagggggtccaaatgcaggtgcgttccatgggtgtattgcctgatgctgagatttgggcttctgttgaacccgtcacccaaatagggaacacagtacctgacaggtggtttttcaaccctgttccctccctccttccccactctagcagcccccagtgtctaatgttcttatctttatgtccatgagtacccagtgttagctcccacttacaagtgagaacatgtggtatttggttttctgctactgtgttaattcactttggagaatgacctccagctgcattcatgttgctacaaaggacatgatttcattattattattattattatttgagacagagtctcactctgtcgcccaggctggagtgcagtggtgcaatcttggctcactgcaagctctgcctcccaggttcaagccgttctcctgcctcagcctcccaagtagctgggactacaggtgcccgccaccacgcttggctaattttttatatttttagtagagacggggtttcactgtgttagccaggatggtctcgatctcctgacctcgtgatccacccccctcggactcccaaagtgctgggattacaggcatgagccaccgcgcctggccctcattattttttagagttgcatagtattacatggtgtagatgtaccatacttttcttagcccaccattggtgggcacctagattgattccgcgtctttgctattttgaaaagtgctgccatgaacgtacaggtacaggcgtctttttggtagaatgatttattttccttggggtacagacgcagcaattgtattgctgagtaggatggtagctcggtttttcattcttcgagaaatcttcaaactgctttccacaggggctgaactaatttacattctcaccaacagtgtataagcactccctttgttccacagcctcgctagcatctgtgatgttttgactttttaataatagccattctgatgggtgtgagatggtgtctcattgtggttttgatttgcatttctctgacgattcgtgctgatgagcattttttcctatgtttcttggccgcatgtatgtcttcttttgagaaatctctgttcatgtccttcgcccaccttttaatgggattatttctggtttttgttgttgttgatgtgtaagttcacagaaggagtttccatctgaggctgagagtgggcagcagaggggcgccgtctgatacagaatatccagaatgtctgcagttcccttggctacccacaccgcggggcttgagggacaggagccggcacaggagagcttggctgcagtgtggacagtggtgggaggctggtgggtgcagaaacggggaggtcattcaggaaacggtggcaggcgtcatgaagcaagtacggaggctaggcccgcgggggaggctatggggaaggagagactgtgggcagctccagggagggcggcccagaccccgagacagactgatgggacccgtggagagagagggcgagagagggatggaggggctgcgaggcgtccagcctgcataacaggtgaacaaatctgcctctctaaacacgagatctgcctgcagggaggcgacttccctggttcagtcccctctgatagagaccggagaaaaggccacctgggcaaagcttcccaggtggggcgagcagctgtgggaaacggtgcgcactggagcaccctggccagccagtttttctctgtgtttgcagaaaatagtcatttcctcctctttcttctttttattgccaggagagaagcatttccgcgaagccccagtgcacgtgatgggaacgtgctcccacttcctatgagttgctagaatgccgaacagtctttgtgaacgcaaatggatggccttgtcagcagcgagaatatgtgcagaatatacagtggcattagacagggaggtggccggcatccatggagcagatctgcatgggtacagcccgagggtccggaggcgggctggagacctactctgcctccgcccagcttcctcatgctcgagcctgctagggcaggactcagcccagagagcctgctggatttggggctctgtgtggaagggcgaggagacatcgcagtgccactctgacactgcatacattttcctaaagcacaggaaaggaaacagaaggctccagggagccccaggacttgacctctgggattgggccattctaagggcaggctcagcagtctctctgctctccaggaaaggcgttccctctacgggagacagctctgggcttgctttgagggctccagactggattcagcatacgcgggagctgggggagggcggcttgcaaggcggtgagctccccgccactggaagctggaagctacagggaagcttccgcggaggactggcgatggcttctttgctccaacagctgctccttgtgccaggctcaggctgagttacagctagaggtgcagtggctacaagagtttctgctcacggtcatggaagagaaagaaaatgaacaaggtaagtgccatgaaaaaaaaaaaaaagaggcatgggggagaggtgggggattttgcagcttggtccccagcagagaagagccatttgctgaaaaggagtagcactgggtgcatctggagcagcggcagcccacgcagagggaacagccactgccgaggcccagaaatggacattcgttgtgacattcgatgctgctgagatgacatctagcagttggtgccttcccctccaagtccagagaaggaggtgaggcctcaccgggggggcctatggcctggaaaaaacctgtgtaggtgtgatcttgttctggggtccactgggacgggggtgacaaccaggcggccaaagtggagcgtgggaaggggcgtgtcaaagctgagctctgtcctgcaggcctatgggccagcggctccctctgtcaggctggtgggagggggctccgtctgccatctccctcacccgcccccccttcccccccccccccgctgtggctgccagctctcacacccggcatacgctggattcttattttagctactgtgacaattctcaaaataggcaccaaagaggaaaaggtgagccttcccccacaggtgctggagggagggccactgtggggcacacaggcagcccctcccgacatggggtcttattgtgtttccctcacacttgcaacgggaacagagtttcaaggctgaaagtttaaaaactgcttcaggacttcacgaaaaccctgaatgaaagtgctttaaaaagtggcaaaaaaaagaaagaaaaagtaaaaacacccagaaagtgccaaagaaaaactgcaacaaagtagagaagttaaaaataccttaaagtaatggagaatgagagagtttaacattctcttaggaggaagatttaatccagcagctgacacaaagtgtttgcagtcgtggcccgggaatcacgggagttgaatcggagcccctgaagatcacgttcccaatgaacaagtgcaggaacagaggccacagcacatacccagggacatcagaacttctcacatacaggttgggtttgcgtgcatagaaattccttcctcttactaggtacaagcaaaccctcctgaaggaaccagagatcctagaatttctaggccatgtggacatcatcaggatcctcgttgctgtctcagttgtgcttacccttgggggactttcctactggctgagagagcagaaacaagacattaaaccaagctgggggtgtgccttccagctttgatgctgagccagaaagatgggggtggagacgccacttctgcagagcccagggatgccacttgaggatgctgtattcgtttttttattgctacatgacagattgccacaaatttagcattcaaaataatatgtttattaactcacattttccatggtccaggaatccaggccccaggttctgctcagggtctcacgagcctgaagttgaggggcccccgggcctgcattctcatctggaacttgaggtcctcttttaagttcattcagtttgttgtgagaattcagttccctgaggttgtagggctgaggcccctagttgtttttttttttgttttttttttttttttgctagttgcttgctgggcccatgctcagctcttaggaccaccctctgttccctgactcaggctcctgtcgttggtttacagtattgatgtctggcctcttccagcattgcaggaacatgcctcatgctttgaatctctctgaattccctgtctgtgacctctagacccagatttaaagggctcatgtgattaggtcaggcccactctgagaagctcccttttgttgactcaactgattagtgaccttaatcacatctgttagtcattcaacacagtgatcatgagaatgataccccaccaagttcacatattcacagttcctgccacgcttgaggggagggagtcacagaagctgtgcatacctggggcaggagtcttggggccaccctagaattctgccaccacaggcatccctgtgggaccaagccacagccatccagtggtgccctgacccctccatgtcccttggtgacctctcacccgctgtgctgtcactgacagaatcccagagacacggggctgtggaaacttcttctagtcatcttgtcagtgacaggaagggtgctttgccttgccctaagagtgatgcttaatgatctctcagttaactggcttttcctcaaggatctgaaagccaaagtcctccaaggttgatcactgagcccccacagcctattttatcatcaagaaggcataagtgtacaggttccaaagtcagacagctgagctgcctaccagctgtgcagctttgggcaagttgcctggcttctctgaggctcagttttctcattataaaatcgagacaagattggccctacttctagaatcattgtgaagattagagtctatttaaaacacttggcacagtgtgtggcacacacagtaagcagctggcacttgtgatatggtggcattatctctcatgcttctagagaggttggggtgaagatgtgtgcatgagtgtgcatatgtgcatgtggtcatgtaggtacatgtgctcgcatgagcatgtgtgaaagcatgtgcgaccatgcatgcatgtatcacgtgtgtgtgcattgtgcctgcataaatgtgtgaaagtttacatgtacatgtgtgagtgcaagcaggcggatgcacacaaggttcaaattcaggaggtgtgatgctagtcacagctcagttttcaagaaggtgcctggcatgggcaggaaggtacctggcattccactttctgcacctcagtttctccatttgcaaagcaaaagatggactagattttctctaagtactcatgcatctctaaggtggcaccatcctacatggaggccttccagaactttctttggctcttatttgatttgatcatttgtttttacatactttgtatatacatactgtatcagtcagaattttccagagaaacagaatcaaaaggatgtatagatagatagatagatagatagatagatagatagatagatatttagaaagctatttatcataaggtattggctcaagcaattatggaggctgagaagtacagacacaggagagctgatactacgaattccagtgcaagtctgtgcttgaaggcaggagaaaaccgatgtcccagcttgcagacagtcaggcaaagagaaagaattttcttactcagctttttgttctactcaggccttcaactgattggacaagctccacccacaccagagagggccacctgctttcttcagtccactgattcaaacgttaatgacatctagaaacacccttatggacacacccagaaataatgtttagccaagtatctgggcactccatggctcagtcaagttagcacataaaattagccatcacagttactttacgtacatttgcgtacaccaacgtacaacttttaaaggttaaaaatgtaggaaagatgcactcggtcacatttgtggaagctacgcttgacaagatagcaatgcttaatgtggaaggccaccatcacaccctttgtatcactctcccccaggccttttctccattctcctgaattgcacacttttcaagtcttctgatctgaaacatttctccccaattgaggcgatcggacgtgatctcagaccgtaatgtattgtagcttttaactgttgagccagactttctgactcagcacattttaatcaattttctttgctaagatcagggagatgtcatctataataatcccatctgacctcccaaagtcaggctgataaaaatattaatgtcagcttcttgcagcctggcagagagcaacacccagcttgacaagcaaacaaatggctcagagctgtctgcaggacaccgatgaacccgtattaatgaatagcttcatcagcaagcattgccctccaggcagagctgccacaggctggagactcataagaggctcagcagccttcctggcgaggtcttattgcccatcattggggccatggaacgtcaattagacatgtctgctaagatgattcaccctcctccataatgtgctccagttgggcagctgggatcacccaacatggctctttacttcttttattctccctgcctaggaaccctcccattgtcacctgtgtcaggtatttccagctgtgacatcagagacattaggccctctgagaacacttagcaatcctaaataggaataaaggattattcccaagggtcacaactttatgaaccttgacctgattcagcaaggagtatgtttatttgatcatcttgtttgttcatgcagtttctcaagaaacgattaccaggtagggtttgagtgactcacaatacaagcagttcagcatctccctaactcttgtccctctgtgaatatctatgcttcttgtctggacgctgcaggttctgagtttctcactcctgattttactggggccatggtagagcgaggcaaatgttaacgtgctcacatcacagatgcaatcacttgtccaggctgtgagtcggtgctggggcagctgcactgctggcctctggactctgactccagtgttcattgcattagccctctctcaagtccatctttctgtctctagtcttcagagcctgggacctttcattgtgaaagaggagaggacaagcttttcccatgcgggtgagcagcgaatccaagttgcctgtctccactcttcaaaggcaggaaattgtttcaccatgttccacaaaaggaatatggtctgcaaatggaagaatcatttgggaaagcagcttatgcaggagccccaggagggtggctgcagttgattcaatggtctcatgacggtgtgatgtgtgatgcagtagcctcctggcaaagaagtgcccccaagcagacccgctgtatccttggaccctgcagcagccaaactacaatacatagccacaggcattggctttgcccatccagtcccctctatacagcccattcatatgacctgagcactaaataaagacctcagaatggcagagatacagccagggagccgctgcttactaaattactaaaatgtaatgcctcactgggttggatgccggcattggcagggcttttgtttgttggtttgtctatttgtttagcaaaattagcaagcaaaattaaacccttgtcaccttcttcagccggaatgtgagctggaagaccattctccagagcagagccttcatttgcaggcttttctataactggggagcagtggagggacaggaggtggaagggcactgctgtaaccaccacagggcatcttactcagccccaggagtgaaagtggaaagaaaagcacaggcagagagacctgcacactttccctgctccctagaggaccctgccaatcccgggctgtctgggtactgcctcccaggagctctgtaggaaactggaaagggagtggttggaaacacagtctctgcagtcggagctggaacaagtcactgaatccctctgtgtctccacttccttgttttatctcaaggatgataatactagcatatatctcccagggtggttgtgaaggttcaataaggtgcatatgcaatatgcttagcaccaaaactggctcgtaattacatgcacaataaatgctagctttcattaatgctgtctgtcacgtgtgagataaagctactggtcccaggaggcctctactcctgctaggatgcagttcccttgggcaaatggtactcccagggctggtgcgcagcgcctctgagcagctgacagccaagattagatgagttaagactgtgtctcctacctccatttgcaaaatcctctataaaaaggtagagtaggtaaggtggaaggagagagtgagtcacccttcctggagcacaagccagcggcgccctgacccccacctgtgctgtgtcccatcaagctcccgtaagaggcctgtgtacatcctgctgtctttccccagcacagcctgctttgcacctcctccaagatcctgctatatggaggtgatttgggaggaagacaggaccatgggtttccctgacctgcctatttctttgtcctaaatagtgttaccgagccccaggtcttcaggcataaagggacctctcaggctgggacaacacagtgcatcttagagggagccaccatgaactctggaaccttggtgccacgtgacatccaaggacatttgtgtaactcagcagagtaaatgaggacaaggaggactaaattgctatctgagatcgcctttcccatcagcaagatggtggaactggggttctcagtgtccagtttaagttgatttaaagaaacttgagaattgtaatatgtattgcatgctgcaatcatgaactatcgctcatacctgctgcacatctagcccccctcccttcctccgctgccacttttggtccagcatgaaaagacctcctagctggtctccccacatcctcttgttctccttctgcctactctgcacatggcagccacaatgacatttgtaaaatggatatctggtcatgcttctcctttgctaagaccctaggaggaccaccactgctgctcagcaacccaccccccactggctctcagccacccactccaccccatcctctttggcgccaggctccagctgtctccatcattgccagctttcactgagctctcacagtaggcctgaagctcttccacttattgtatgacctcatttagtctcaactccttgggagatatcttcacagaggcacagtgaagttaaattatttggctaggattgccaagccagggccccaaacctagtcccagcccatctcttctatcttaataaatatcatcagctgcccagcatgtcatgccagatgcccaggagccaccttccatcctcttcctccatcaccccctatatttactgcagcagcaaggcctgtggattttcattcacctgcctcccgtgcacacatttgtcccttccactgccgtctcgctggtccagtcaccaccatccctcactggaacaactccagcagcctcctcgctggatggcctgctctaatcatgccctctgtttgtttctcttcctctctcctttcctccctcctttccttctttgctctcttcctctctccttccatcctttctcctttttctttccttttttttttttttttgacagagtctcacccaggctggagtgcagtggcatgatcttggctcactgcaacctctgcctcctggcctcaagcgattctcctgcctcagcctcctgagtagctgagattacaggcatgagtcaccatgcccggctaatttttgtatttttagtagagacggggtttcaccatgttggccacactggtctcaaattcctgacctcaaatgatccacccacctctctttccttttattttattttatattttattttgctttccttttattttgaaatgtaggttttctttctattgaggtatgatggattgagcagagcaggagacacttgctattaaagagagagcttgttacgcacagttcccaagaggaggagacaccatgccatgagggggccacagggggaagagggagggaggggaaagggtggacaagagcctttatgtgatttccatgggaagaaacagacgaggcaaacatgtaggcttaggatccactagtttgtccaatttcagcagccccagcatgcagaggctgtcactagttgtctgatacctggccccggggtgattagggcaaggcctggcgtgattggtggctaaaagtgaaagaacctacgagagcccaggaaaggaagtggtcggggtgtgggctctggattgattggtttgtcgaccaaaggggaactcgcaggggagttgcttattttctctaggaactgcctgtccctgggaggggcagtccctccagggtgaagtccccagcatctcaaaacatcagaaatacagaaaataaaaaggcatggttagtattctttccttccttctttccttccttccttcctttcttccttccttcggagaatctctaaaggaaatagcataccctaaatacagttgaaacccccttcccctacaaaaatcatacatatgattacatatgcataatctctaagttagatatgatatctatgcatttctataaattttctaaaggtattttgtctctttgccttatgtgcccccttcccctacagcacttctctcattctccatcaaatgcctgaatgtttctaaactttgcatgaattatatcttgagtatatgatgtgtgtgtgtttgtgcatgtgtatgaagagaaagtttccaagatacattcaagaagagtaacaaaaggcaaaaatagacagaattcgatgtgaaagtgcctcctaaagaaacaagcagcatgaacaagaataaacctatcccctacacctcacagtcaaccgcagggcgccacggacagggagaaacacaggaaaggccatcggaagggaaacgaccaaccaccaaggggtgcccattgactgggtggagaacagacttcccaaccataagcggcgcaataatatcttcagaggccaaaataaaatgaaaagccaacttggaactctatggccaattaagcttttcggacataaaaagtttactacccacatatccttgctctaaaaaaagaaaaatctgtgacaagaaacaactcaaaatacacacatacatgaaccaaagggaaggaggggaaaggaaagacaacaattgatagactatgttttatttatcatggacagtttcagaaaaaaatctattttccctaaattacggaggatggaactaaaacagagaaaaaaggaagggtgttccctgaagggttaaagcatattagggtcttaccttaagaccctaagaaaaggaaacaaacacacgaaatacctttaacaaatttatagaactgcatatattatacctaatttggagattatacatttataatcatatatacgattaaaaatctaggagtacaaacacgctttgtcgttgctcttacaaaacctgagatcacagcaaacattgttcttcaacttaactttttcccttggtacatgttgtcatctctccagctccgtgttctggcgcttacacaccagtcctttgttgaagaacaggtgattctgttccaatttgcactactgcaaaccatgttttagagaaagtccttgtatgcatagtttacacattttagagacccagattagaaccacgttcacagcaaggtttgctcaaggaacaacgaatagctgataagcatatctgcataaaactcaagaggttctacataagattcagactgccacctgccctgggaaagctgcaatgtgctcagtagcacctcagccctggcattccccaagcaccaccagcagcgggctgacaagagctgtcttggagcaggacctgcacactctggtctgcctcaagctatttcttcactgatttctcactggccagacccagcaggcttctaagtgtgtcaatgccttgaggttgattacattcataactatttttttatttctttttaaattcttttttaagagagtcttactttgttccccaggctggagtgctcactccaacttctgcctcacaggttcaagcgattctcgtgcctgagcaactcaagtagctgggattacaggtgcaggccaccatgcccagctaatttttatatttttagtagagacagggttgcgctatattggccaggctggtctcaaactcctgacctcaggtgatctgcccacttcagcctcccaaagtgctaggattataggtgtgagccaccgtgcccgacccttttaaaacttttgtagattcacgggatacacatgcagatttgttacatggatatattgcacaagggtgaggtttgtgcttctagtgtgctttgacatcactcaaatagtgaacgttgtacccagtaggtaatttcaaccatcacccctcccacctcggcttttggagtctccagagtctattattccctttgtgtgtccatgtgtacccattgattagctcctgcagataagtgagaacatgcggtgtttggttttctgtttctgagttacttcacttgggattttatttgaatattttcaagcctagcctttggaagtcgttaccgtaaaattgtgtgctaacttccctcagtctctcgctctctcttctttgggaaggagctctccagcttcttggtctttgtgaataccctcattccagaatgacttgtgttccttcctgacccagtcactatgtcctgtggaagtagagggccctacacatttccctcaggatgaagagaactatttcacttttttgcaatcactgaacactttttcaaccttttctttgatggggagtcaaattgtttaattatttgactaggtcatgcattcacctggttaaaatttattagacaaaattattatgaaattataaaagttattcaaataactttctttcccccattctttcttccattcatctaagtcctactcccccgcagcaaataaacgcatagttattagattccggtgtatccttccatagttttttaaataatgattttctaaatttttaattactttttatttcaatagctttaggggtacaagtggtttttggtcacatggatgaattgtacagtggtgaagcctgagattttagtgaacccatcacccgagtagtgtacattgtacccaataggtagtttttatccctcacctcctcccacctttcccctcctccattataccattctgtatccctttgtgtacctatgacttggctcccacttataagtgagaacatgcagtatttggttttccattcttgagttacttcactgagaataatggcctccagttcatgtgagttgctgcaaaagacattactttgttcttttttatggctgagtagtattccatggtgtgtatgtaccacgttttctttatctactcattagtcgatgggcacttaggttgcttccatatctttctaattatgaattgggttgcaataaacatatgcatgcacgtgtattttgatataacgacttattttcctttgggtacatacccggtagtgggattgctggattaaattgtagatctactttcagttatttaagaaatctccatactgtgttccatagaggttgaactaatttacattccctccagcagtgtataagcatgtcctttttaccacatccactccaacatctattgttttttgactttttagtaatgacctttcttgcaggagtaaggtagtatttcattgaggtcttaatttgcatttccctgatgattagtgatgttgagcattttttcacgtttgttggtcatttgtacatcttcttttgaggaacgtctgataatttcatttgtccactttttgatgggattctttgcatttttcttgctgatttgtttgaagtccttgtagattctagatattaacctctcggggaatttttaatacacatacatacaaaagcaagatacaatctttcccctgtctttaattcaaatggcagcatgttctattattttcatgtttacttaaaatttacatattgaagaatttctcatgtggctacatggagggctgtctcattctttttcataaagtcctagaagattcttgcatggatgttcaaatttattcaacccaatcccactgacaaacttttaggttgcttccaggtgtttgctattacaaacattgccacagcaaataaccttgaacatactgaccaatctagacatctcatcaaccagcagaccctcctgcagaatctaaaccagcacaagctccccgtccttgtacaataaatagactccatcttctctattgatcatctgcttctccccattcaaagaaacaacaccatggaatacctagatgcttgaagtctaagcaacgtggagacctattgacttttatgttctccaatgactcctgcagattaaagaaagaaagctgattttatctctatctctccctatgcagtgttataaaatgtgggtctaggagagcttggcaaattagatgacggctttttaaaatgttggttatactttgaattattagcagcacgaatatagcgcaatatgcacataattagcaagatttctgaatttattatatatacttattcttgtttcttttaattagccagcactctacttgaaggtagtatggtgattcaaatgatggttaaatgtgtcagatggtgacaaaatgcactaacccgccagagtggaaagaagaaaagtctagaaatgccatgagatcgttttcatcctattaaatgcataaaagtttcttcatgtattggtcatgttataaccatggcacaatcaaaacatgatttattgagtattttaatacagcctgttaatgttatgcaataaagtgtattttaatatttaatgtaatcagtgaatttcaaacttttttcaggagatcttgtggttttaaactaaattaaatacagtaggtgacaaatgaggtcccaagagcatccctaaaggctgattgggcctgtttagagcaactagaattcaaaagctggttttgggccaggtgcggtggttcaggcctgtaatccagcactttgggaggccgaggcaggtggctcacctgaggtcaggagttcgagattagactgaccaacatgatgaaaccctatctctactaaaattacaaaattagccaggcatggtggctcatgccagtaatcccagctattcaggaaactgaggcaggaaaatcacttgaacttggtaggtggaggttacagtgagccaagatcatgccgttgaactccagcctgggcatctcaataaaaaataaataaataaataaagctaggtcagaagctggttttggttttggtgttgagattgctgtggagtagggggaaatgtgccattgcttgagaagtgagctgataagggaagttcatctgctcacatggaacaggcattcttgaggtcaaggtcattggttagttcctggatgaattgtatgaccatgatagtgagcagctatctttctgtagcctagcatgcattctttgttctcctgataatagtgtacccatttcctatgaggtaattaatgcctccattggatagagcttagtgagagtacaggtgtactgctctcctccaggtgtgagcattcaacccacaccaagtaaggagagttctcctctatcagtctggtttggtttggtaatgctgcataaccagcaaccccaaattctcagtgtcttagtgtaaagaaggtttctttctttcttgagcccatcccaagtcaaaagaggggctttgataattgtagtttctcaacccaggttgattcaggctgcatttcagtccatgctttcatgaagaggaaggcaataaaaagaaaattttgcagggtcttgtccctcagcatattgctccaggctgtcacatgtcacctttgctctaaatacattggccagaggcaacacatacagccccatccaaccacaaagagtcaataagttcatagtcactcaaggggacagaagaggacaatctggacgaaggcactgatgtcccattgacacatttcctttctgtattttgaattgtcagcagaatggtcttccaaaagaatacctctctttggaatccatttatgccatgggaaatacttggacctcctccagagcatcctttgctattgaaactctctaatcccgcctttcccaacaaaccctcacatccttccatgtccttccagtgggtccccttgcacctccatgagtaagcaagatccagcctccagttctcacaatcaaagagcccaagacactcagctgcactgccctgtgacatcagccaggcactttgtcaacatggctcagtttagtgcttccctgaattctgcaaccctaaggctggtgccacagtcacacaagagctgcatccacagaactaactgagaaacggagccccagagacggcagggtttgcccatgggacagggattaggatctgtccaaatcccccataaacctcccgcaaggcagagggaatatcagcagggagggtgaggtccctgcacagaacctgccatggaaatggaagaatacttgagccaaaagagacctcagagaggatcttgcctaatccttgcctggtggatgaagaggggaagacacttgcccaagaccacatgattgcttacttgcagaatccctaactcacacctaggtggacgtatctaagaggaaagtaaaaaacaaggaaggtgcacatctgagcatacctgggttgctaagactcaggctggggaccacaacagcccctttcactccactctggcttgagctggtcctactttaccccttcctttccccaggaaagaacctgcaggcagccaagaagctcagcctctgtctgaatctcccagggaccagctgctttctgtagaagcccataggaatagtttagaaaattgccaactattatccatcagctctaggaatgggaggtcaatgggaggtataacttggcagttaaacctccatttaagtcaaagtttacaacttagtcccaaggcacaagaagaatcttctccctcaaggactaaagcttgaatatcaaccaaaaaaaattttaggttacaggatggaaaactaattcacatatacacctgtgcacaaatttctacacatcaatcaacaaaagcaatgcattagtcctgaataatcacaaataattaaaaatatatatttttctctgcatctcctgaggctaaagcagtgaggatcttctactgcaaaattatcactcatattaacccttatgactgcttttgaaagcataaatcccatttcaggcccctccacaggagggcaagcttcacatagaccatgacatctttttggtttgcctacaaatggacacaattttgcaaagatttatttttattgtttgaattaagaaaacactgggttttcttccatttaagaaacatagaattttgttataatgttaaatatgcttttaaaaacttattcttcgaggatttctgtgcctctcaatttcagaaaaaagaaaaattcccgaatgtgtttggtggtaaaccaacttccaaacggtgaagtaaaatagcctgaaattaggaaagttaaaaacgtaaagttttaagttaaaaaaagtaataaagactccattgagaaagtgaaacgaaaatatttgcaaatcatgtatctaataggggactcatgtccagaatatataaagaattcctgcaactcaataatattaataaaaacacaaacagtccatttaaaaatgggaaaaatatttgaatagatatttcttcaaagaagtttaaatggccataataaacacaaaaaagatgctctatataattcatcatcagggaaataaaagacaaaaccacaatgagaatccattttgcacccaccaggatggctaaaattaaaaagacagatcatagcaagtgttggtgaggatgtgaagaagatagaaccctcatacactgccagtaggaatgaaaaatggtacagccactttggaaaacagaagaccctcagaaagttaaacattgatttaactttaaataaacatagagttcttcaaaaagggcgttgatgtgacttagcatttccactctgaggtatatacccaagagaattaacaacatgcatccacaaaaaacatgtatgtgaatagtcacagcagcgtcattcataatcaccaaaaagtggcaagaactcaaatgcccttcaactgatgaatggatgaacaaactatggtacattcgtgtgatggattcagccatagaaaggaacaaagcacgaatatgtattacaacataaacgaacttcaaaaacattaagctaagtgaaagaaggaagatgcaataggccacatagtttatgatgcaatttataggaaatgtccagaataggcaaatccgtagagacagaaagcagatgagttagggagaacagaatgattgctagtggatatggggtttctttagggaatgattaaatgttctggaattaaatagtggcaataatggtgcaaccttggaattatactaaaacccatgaactgtacactctgtaagagttaattttgtggtacatgaattattactcaacaaatctgcaatttacaaaaaaataattaccttcaaaacaagatgaagaagaaaaaggagaataaggaaagaagaagagaggagagaagaaggaagaagaaaaagaagagaaaaggaagcagaaacaatgctcctgttggtttgcatttcagagggaggtgctgatgccagcatgttccagcaggtcttgcagagctgtagcctgaggcttcctgcccacaccccacaaaagtcagcttcctgtgtagaaggagggtcaagagctgcccactgggtctcctcatggttttgcaatgctggctgacaagcgctcctctgaccacccactccaggcaggaccactccactaggggacactcctgctcctcgagaagagacccagtggccaccaggacagtgcagtaactctccagcccctctctatgccccgcgcagatcaacgggctttcttccaggggagtttgcccatctcctctcctcccttttatttgtaaaaattgcacctcctccgggaagccttattacccctatctaacttatattaactctaaaattccatgttttccaacgtgcacttctttaagtattcctcagaaaaggcgaccccgtgtaggattgcaagataaaacgtagatgtccaggaaaatctgatttttcagatagacaactgtgagtatgagtatttttatttcctcgaggacttagagacattagatacccctgcagggtgcactgcaaattcctggggagggttgtggcctgcagcattctctcgatttactgaaccacaaaactagaattgctggattaggcaaataaaaacacaaataacattttgagtttcaggtaaatgatattttatgtaagtacaccgcaaatattgcatggatatacttgtacttcaagattatggtttatctgaaatggaaatttcactgggtgtcttgagttttaactggcagccctactgaggtggcttattcatcatatagactctgggcatcattttcataagtgtgcggtagaagctcaggaaactgaatttgtgagaaaggcctcaaataggcaggtatgatttgtctaagggtcatgaaatgggagagcagtgtgtgtgtgtgtgtgtgtgtgtgtgtgcacacgtgcacatgtgcgtgaattggggccgggagcgggtggtgtttgggttaaaaggcttcccagaaatcccgaactctgatccatatcttccggctactttaaaatgactgaaacctcaggttcctttttcagtgctttattccacacaaactcatcttttaggaggctatttgacagtgcttaactgcgacccacattgtacatgctcataacaaagacaagtccccatctaccatgctgtaacttagaaaggcacaagttatacaacatctggaatctacccaagggaaaaaaaatgccagtctacaaatctagcatgctggaggcagaaaccatgtgctcagaatcattaaaatcacatttcactttgccacagtgcagctctgtccctggctgatggccagataagcttgctggcagagatctgctcttgtggtgctgagcgaaaggtccacacacctctcggttaatacctgcccaggcttaatacctaatcaccatcctcggattgcctctcaacactcattaccagcactcagcagttgcagccaaggtgatgggatttaagattaggacaaaagagtagtcacttttgttctcaagtgcaggtctcctcagaacatcatcgttcagcaaattcgggagacagcatttccactttctactgaagcatcctgtaagaatcagaaaagcatgacaccgttaaagataaacaaaatggccctatttgagcaagaggggctcatgctgtttggtctttgttttacgcccatgatgagtttaactgtttgttcatctccagcaccccagcctgaaactcaccccttgacaagcaccctgcaagctacagtgattctgaatcccagaagtgatgggctgtcttggagaatcccaggggctgtcctgtgctccaggcctgtctcaggactccttgggtggacgcaatctcctctagtcccctctaaagacttcttcatcattacgatggtgagtgtgggcaaaccaggtgggatagtttcccctgtcggcctaccagattagttgcttcccaggaggcaggtagaaagggaaggagggaggagagtgggaggagccaaggagaaaggaaagagagggaggacaagaagaaagcaagagagagagctcttagggaaagcagggaaacagtgacgaagggaagaccagctgtaccatattaggtaagtgatcatttaaagtcattatcaacttactgtgaatttcagatggagtttctggaagctacagtcttatttcctgttaggaattcattcatgtaacaaatgttctatgggccgggacactgtgcttggggatgcagatacacccctgaatgtagccatttgcattttaataaggcaaagcaaacaatggacaagtacactcacagataagacaatttcagacaatggtcatgctggaaggaaatggcatggtcatgggatagagagccagaagcaggaggagatgttagacagggagcaatggacagggaggagatttagaaggggcctcaaggagagagcgcagtgagagaaggagccccctgtgtgtggacctgggaaccaactggcttggcgggtggtgccatgccacagaggtcaacgtggctggagtgctgagcaaggggacaagttgcagggcaggagtctaagggcatgcagactggcaggtgctgataaggagttggattgcattaattcaggactgtaggaaaaatgcctctgtgatcagacaaatggtcaacgtctcttgacaggaaaacattggctgtgacgtgggttgtgcaatgaagcttccaacccaggatctgtttctgaatggctgtcatggagcagagagcagaggctctgcatggccccaacacttgtccctcctccaagctccgacattaagaaacatgcctgcttcctcgtggaggagggaagcctggtctaaggtgtgtgctacaggagaggaaattcacaccttcagttgcctaggtgacagcttccaaagtatgttgcgggtctaactggcagcctggcaaggcctctgagatgggaaaaagggagcccctttccattggagtcaccatgattggaccaaattctggtcctcagctcaggggcccttgtttctggtgaaatctttcagctatatgccaccagaccccaaatatgtgtctctcccagggctaaccctggaggctgaaagaaaccagaatactcacccagcacggtgactcatgcctgtcatcccagcactttgggaggctgagggaggaggatcacttgagcccaaaagttggaggccagcctgggcaacatagcaagaccccatctctccaaaatttttgaaaatggctgggcatggtagcatgtagctgtagtcccagctacttgagagggtgagacaagaggatcacttgcctctcaacccgggaggttgaggctgtagggaactattattgcatcactgcactctagcctgggcaaccctgtctctaaaacaataacaacaacaacaacaaaacaaaaaacaaccaaaacactattgtctagtgtccaggacactagggcccaggatgtggcacagagcatgagagccatctgcagcagcacctgtgcccagctgctcatgggaagccatgtggggtaggaggctgacggacagcccagggcagggccaaggcactgaaacctcatacattctagtcagtcccaaacgagcaagaaccttcagcccaggtgagtttgtgtctcggtggatatacagtgtctctacccatgagcagtacttaaatgcctgcacatccatgtcacccacttcatcttctatcagtcactacaagcaccatctcctccaagaaaatatgttctgatggaggaaacactggatgtggagtcagtggcctgggactgcctagaagcttcactgagtactggctgtgtaacctcagacaaaccactcaccccctctgagtctcattttccccacttatacattgagtctagcaatgcacacctcccaggactgggtataaggattagagtcgacgaatgcagggtacgcagtggctgatatttgctaaggaactgcgatgttctgattcaatgtggtggccagatctggagatcctgagaccatctagtcatggttgctctagggtgtgagagatgaaattcagggaaggtagaggaaggttcccagatgtgacagcttctgcagggagtgggattgccatgggaatctccagagactggacaaagaggagcttcactgttttaaaggcatcagatggacagatgcagagccactttcctggtaggatttatgactccagcaggcccccggctccaacagacagctcattctggaggaaattaggtgtcaaatgcagtgttctggaattcttagggcacccattggcagagttttacagccattctggctctaggccttcgtcaacttgtcaaaacattgactttcctctgcagctcctaaccaggcaagcaccaggcaatagcaatgagtaatgcagctcttaacacctcagtctgaaaagatgagacacctcagaccctggttcttctggagtttggggcagttatatgacactgaagtcatttgctccttgtcacacggggaggactttctggcttttcaggctggcaaaagactttccccaggtgagtagagctttctggagttgagacatctaacatcacatcccagatgagaaagagcagatccatcccactggccacttgcccccacaaaaatgggggtaaggaaggcagaggattgtcagcaaagctctgaagagcggctctgcaccaacaggcagccggcaggccccagcctggtcccacgacttgtcactgaagatactaaacccgcagccgctgaattcctgtcctagttagggtgtctcttaaagcagaccctgaacaatgacttgggtgcaagtagttgatttgagaggtgacctcagggaacaggagcaacggagcaggaggaagccagtgacagggtgcagccctgtgggaaatgggggcccaatctgcagggccaacgcagtgttgtgaaattcttcgagcagtctctggagagcaggggagcatggagctcagaactgcccctctgaaggactagagattgggcgtggatccccacagcatcccctgctggtagagggttcatccttgagtgtgttaacccttctgctcttccagactgtgcctctgcatggctgattagactcccacagctcaaagaaagctccgaatcaaaaaagcagaggttgcaggctgcctgccagaagtgagaccctggtgatgggcctggcactgctcactgcagtgctgatgtcaggagggcccaggatgtggcacagagcatgagagccatctgcagcagcacctgtgcccagcagtgtgctaagcaccaaatgagagcagaagtcattgtgaaaaacagtgcccagcctcaatgactcctaggaaagtttggaatagacaagtgacccccggggccccagcccagaagcctaagttagaattgagtaacaagaagaaaagatgctgttatttaaaacaaaatttgactgcagtggctgcagcactctcaggcagaggccaagttcttcgtaggggtaggtggcctttttgtttagaaacatacttcagaggatctctttgtgtgtgtgaaaatataggccccagggcacagtgggaaggagaaaggcagagcgctctgctctgtagtgattggagtttttgtcttgtttgtttggagggggcttgtgatgcgaagaagaaaattgacggagcttgggacacaaaggtcaactggcaggagtggattggaccttggaaggaaggcagtcaggagttactccctgtagagggatggtcagggggccacaaggcaaggattgctcacaaaacagccacatcaagtcggtgcattctgtgatatgctgatattaactatctggtgtccctgacccttcggtatgaaacatcttagcctctcattagttatgctttgggaaacaaagaaagaggaacattgggggtgaattaagatagagagaagagagcagccatggaaagagagtgggggacaagaactcagcagggcagatgcaggtaggtgagctccaaaactgggtctcagcccaggaggactcttggcttcacccaggaaagcattcaagggtgagctggtggtatcagacacgttttatggaagctgcagtgcacagcagcagtagaaggactgctccttgcagagcagggataccccacaggcagtgggcccagagtagcagttcagaggcagtgctgcactcatatttatacccacttttaatgacatgcaaattaaggggagggttatgcagaaatttctaagaaaagggtggtaactcccaggtgttgccatggcaatggtaactgacatggtacactggtgggtgtgtcttacgggaagctgcttctgccttgtacctgttttagctagtccgcaatttggtccggtgtctgagccctgcctccaaagtcaagtcccgcctcctatctcagggctgagtatccagggatatgtgctcccttaggaatcctcggagaagttgagaagacactagacatctcacagcatgcagagtaggggcttgagtctgcatatttgaagttggaggaaagtgtggcccccttaagcctgaagaacacaggactctgggctgtaattcagatctatttggtacccagttatcactaccaaaaacgcagctcagccgggtcccatgccagagagggaagcccagggatgacaaatgtggcccctgccctcggattatgccaatgtcctagggcgttccagttgtcagcaaccaacctggctaagcaatgcctgagatggcctggtgggaggctccataagctgaccagagacatcctggaagacccccaggagaagggacatcagaacatcagcttgaatgatgagaaaaaaatagcaataggtagaaagcgagagagaagaaactgtgggcaaagaaaagagaagagtttctggagggagagaccctcatggggtcttccctaggccaccaggaacacacaggtgtcaccttctgtatctgtcaggggtcttggggaaactgaggcacactcagagtcattgagaagagtttagtgaagggactgctcacatgggatagagaggactagagggatgcagtaaacccaaggccacggctgtgcacatcactactgcctgacccacaggggacagtgccactgtggaagaggccacaggaaggagctggggatttcagagaggagcccaacccctgccacttttagcctagcagggagggagcagggcagatgaatatcccgatctctttcttccatccaaccagtcccgcccccattgactaaccgagctggaaacagaggtcacgggagcctggtcagtgcagccctgcagacctagacccacctagcgtgggtgtggagaggcttccggagagcatcctgtgtacttgctgacaaatcagccacctgtcccttgcaagctgtccagcatgagctggcctcatgcgctgaagctcagccctgcttttagagaggtgatcagcagagtcgtagattcaggaaaaacgtgtgggctgcggcatgccaccgtaccctccctttgcctgatacctacaggagtctgtgttactcaggaggactcaggaatctggagattgtgctcttagatggaaaattggaactaggaggagaaagtaagtgtgatgtgcacagatcccaggtggcctcgcattttagaagtaaatggcaatattttcaaatcaactggacgtaatattggaagccagcagagcaactctccagctaggagtctatgcttgaggacctggcattgtcagcaacctggggggccacactgcacccacacgagcacaaggcttaccttcggtcagggtctcccagacgttgcccctggggtggtgatttgtgggcaggtgatttatcaagacaggagaacccagtagggaaaagagggcaggagaggggaagaagccctgcaagatgctatttcaggtaggtctccagcctcagccagaccccattgagggggggcggggtctggaatatcagctgcatctcacagtctgcccagctttgagtcagaggaactggtttttcacacccccacaggatgaagggcaagctgccaggcacccgaggctccttcatgcttgcagctcaagcctccaggggccaaagagaagtcctcaggaggctgttggtgcagtccacttagagcaaagcacatggccgctggaggatgggggcacagagctggcaagagtgatccacatgaacctggacaggaccttaacagtgtctgctgaggcccttgccccagctggccctgaagtcgaagtctggtttgctctgttttgttggtctgtgcagtggagaggaaggtgccaccccagctctagttctccacgtcacttaagaggtatgggatttcagcaaggactgaacaatgctgggcctcagctttctccttcatcctgtgaagaccttcaatcttatctaccttgggggatgatactgtggttatcaaatgtcagaggaccttgaaggatggaaaacacgtgtatgtgactcatcaggctgtgccattgcaaggtgatgctgatgtcaggatatttttgtctgcaggagaatccactactgtatggagcttgtcctggaaagccattgcaccccaccccaccacccccaccatctctcagaagaggtcacaaagagcattttgttacaacataaccttactcaagaaatcactcaaaaaatgcacataggaaccactgaaacatttcctgaatttaaaagaatgactcagcagagcattcgtttgtgatagaactgcttcttgaatttctcaaaactggtgatgttcacaaaggccaaaatgtgtgagcattctgccaaaaccaggccaaagtttgctgctgtgctttgtatttaaaaagaataagaaaatgtatagttcaaaaaataaaattctaagcccaccaactgactaaacagatcccctcttggccaaggggaccccagagtaatcaggaacattgagttctcggccatgatgggatggggagcatcagacaagtctcgttattcccttcccttgctaaccaccactaggctttctttcctaagggctaaacacaaacctacccttccaacacagtccactgctgtgatcaacccactgcttgacgctgctcctcgtttttgcctgataagagaccactgaccatggggtggctctgcctagtccacggaggatgcacagtgagggttttggtgtcctctgctttaccttttgacatcagagggccaaaagttctacccttgggtcatgctaaaaccaccatttttggtacagggggcccatgaaggggcatgcagctcacttgtgcatgtgcatgtttcacctctcataaatattcatgactcctcctgcagcttattgaatatgtatattcagccatccaactcagcacaaattcctgttccctttgcccctccctgaaagtgtctgtttctggcttctcatcagaggctacgcttcccagccggtcagagtggccaccctgcagggtgcaaccctttatgaaaaacaaagttcttctttccaaaaggaaaaaataaagaaagaaaatttgtagtttaacaaagacaattagataaagttaacccactggagatccccgtcctgcaggccttggtgctgattgatctcctgcccaggacatggccacacgggggctagtgggttggtgacctgaggagcactcctgagtgacctcggagttcagggctgcctccaagaatggctggtgcataaagactactcagaccaaagctgagcactccaaagtatgaataatgaaggacatttgctggctcagtggtgagaacctggggtgtttaggctgtcactgccaatagtccactattggctgggatcagaagagcagaaggccaccattttactgatgggaccaagtgaatcccagggtctggtgcaacctggagtggaaggtgcagagatgggcagcaggtccccccgatgcaacccttctgcatgttgacaacaatataaaaagggaatacctgcatttctattttgctcttcagattggagacctggttgtattacactgcagatttactctagccagtcctcagatattgcctactacttaaagtgaattgttaccaaaatgttcagagaaaaccttagattaagcgtattgactatgtttcttctttaagtcatagttaagggcaataacaacaacagagcagctgagtagatattttctgctcatcattaataataacccttcggctgatggatggatggccctcccggtgatgaagagctggcagcactcactctgtggcgggatctgttcctgggagggcctgtaagatatttgatttgagagatgcctggctgctgatggattaggagggcctggtagaaacacagtggcatgaacaccaggaccataaaaagagaagaagagtacaattatcttgtatgttcccttccttctctcactcccggtagaaccagagaagggcaagccgagaagcatggaggtcattccaccagcctgtggactcctggcccatccagtcactaaagctatggaggagaaggcagagagacatggacctgggggaaagaggaggctccctgtacctatcagctgtagggaagaagactctgctccacacagtcacttgggattgaagctgatggaggctccaccatctcatagctacttcatctggaaccagcagcctcctcagcagaaggagggagcaggaagggtgtccagggtgttttcactcgatcaacccggaatgagaggtagcactttgctcacatttcactggccagaattaggaatgtgacctcatctaactgcaagggaactgggaagcaatgtgcccagaacgagtggtctgcacacattgccctgcttccttacctttcattcaatcttcaattgcccagtctaggctgttccccaccacttataccagcacagcctcctgtttccaaacccagtggtcattctcatgtttcccaatctatgggcagcactaaccccagctactgcccccacctcgatctagcctggcctcagcttctgcaatacctcattctgctgggcttccttccctctctctctgctctgtgagtttctcctcacccaaccttctctaaatgttggtgtcttctcagaacagatcttggccctattgttttttctctgtatattctcttgctaaataattacatcagttccatagctttaaatggcatctatttgccaatacatcttaaacacagatcgcagggcagagttctatccctaggagactcacacttttcttctccactgcttgcttgagagcccacagtgcatcatataaggaacttgagtctcccacacttgagtcaatcacggcttcttgtcgtaattggaaatctaggagtggcacatccttgacagctcccttttgctcagccctgaatataaaccatccatatgtcctgtagatttaacctccaaaatacatcaaaggaggtctggaatcaacaaacctcaggctgtctccactgccactcgctcagtgccaatcttgtcctgggcggcactcggggttcccccactcgctccttgtcaagtcattctcccagcagcaccagatttgtctataaaatgcaaaccaaatcatggtacttcctgcttcagtccctgagctggcttctcactcctcgggaatcaagttcaagttcccctccatggcccacatgaccatgcaacccaggccctcctcggcctcatacatgctaccctcccctccacagtgtgttccagccacacagagctccttgtcctgctctgcaccacttgccccctttccacaccgaggccttgtcacactcagtgctgtatcgttcactaaaacgtcaccgccttgatgagctggatgcacagaggcattgaggagaagtgcatctggcatctccccaaaacaaaagacatcactgtatcaaaagaatacctgccctcatatgttcttcccagcaccattcacaatagcaaaggcatgaaatcagcccgggtgtccaccaaccgaagacgggacgaagaaaatgtagtgcatatgcaccaaggaatactacttggccataaagatgaatgaaatcatgtcttctgcagcaataaggatggaactggaggccattctcctacgtgaaataactcagacacaaaaagataaataccacacgttctcacttaacagtgggagctaaataatgtgtacacatggatgtagagtgtggaatgatagactctggagacacccaagggtggggaggatggagggggtgaggcaggagaagttacttcatgggtaccacatacgttagtccagcaatggctacactaaaggctcagatgacaccactacgtattatatccatgtaacaaaattacacttgtgcctcataaatgtatacaagtttgaataaaggacaactgtgagtgtcttctgcacagtttgcaaagcacacgttcccagcagcatctaccttcctacccagataggatctcatcacatggaggtcccatagccatcctcttgcacccaagggtggtgcagtggaccagtggccccttggcagcctttctgacatgaaaagagggtctcagctgccctcctgtgatccatctgccaagtcacacaatgtcccgtggccctgattcctcctaggatgtgcctgccctatgttaggtcctgaacacgtgttcttgtttcttggtttgtctcaggacagcaaggacacttggctgaggaagcctgaatttgaaaattagggttaaaaacaaatttcaccttttgctcagcattcttctcttatggacccaaggaaaacctctgtgttggttaaacactctgtttgtcagcagtgagaaaacctttggcatttagggtgtattttgagtgtataaatcatgtgtttacagtgaaagatgcctgtagcagttcccgagacatcctgggttcctccctgcacctgcagaagtgcagcagaggcccctgtggtcacagaaacacacccacctcctgccagcccacctgcacacctaatgccagttcccagtgtcagaggagggcttttcagaaactcagacctggacaggtcatcaggggctagagagccattcccaggccctcaggccagctggcgtgcccaggagtcagtccccaggggcagctcatctccagagctagaaaaggtactgtcagcaggccacctcttctcagagctgagcacagattactcctatttttcctcctgcacacggagaagcagagaatgccagaccagccggatcccgagtgcagggcactgggggcagagcatcgcgggggtccagcctcgggggtgtcagtgcctgccagcacccagctcctatctttccattcttggaaacagtggatggtttccctttgggaccctgctctgccccatcctcaggccctgtggtttgggtgtcttgccccatgccccacccctactcccttcccacggccagacgcacgcgccatgacaggccattgcagcaactcagcccacagccaggagcatgcaggaggcaggcactcttgcttgagtgggcagaggctgctctgggagggaatgggaagtggaaacactgtcggagtctgtccaggagggagctgttggtgctccccatgcagaggaaaggaagaggtcttggctctttcttctctctgtcagcatggagagccaacagagagaagaaagagccaagagatggggagagccaagccctgacaccagtcttggtgtcccaggagccagcagtacctggcagtagcatctctgtgacatgtgccaacaccttcctcccttgtgctggcctcacgctgaggcagacagtttgccgggagattccaggtgtgaggcattgggcttggctttaagaaaattgctcagagagtgaggcctagggaaggcgggcaggagctggggcccaggccacaggcatgtgtccaaagcctccactccttggcgggggctggggtgtaacaggctgctcagtccaccccatcctctggcctttaaaccataggcacagactacagcagcaagtctttcagccgctgagccccccagcaagtggcacaggcagggttgtccctccatcctctagcacaatctccctcctctccccgcagccctaaatgcatgttctttcctccacccctctgcttacactggacccttagcctgatgtgctcttcattccctttccaccccttccccagaatctgccatccctccagacctggctggagtgcctcctcctccaagaagccttccctgactagcacagctcatgatttgaggcactgggtcactgcaatcatcacccaaaagtgcacagtccacaccgggttagattctgtcctaagcaactttaggctggctgccctctcaccagagccagtgacctcagctagcagccagcaacagagagattatttaacgttttcaggaggaaccattctggccattcagggagaagtcttcaagaagacctaggaccattcccaggacctttcccataagatatatactaacatggacagaatgccatgtgctagaggcaagcagagtgagtgaggcaaggaagagaggagagacctcaggctccagggccaggcaggcctgagtttgaatcctggctctgccgccggctgcctgtgtggcctggtctagtcgcttgaaatctctgagcccagtttctcatctgtggaatgaggatgattgtgactctatcataggcttaagtgagaagccatggcttgaacagggtggatgctgcgtaaatactccctgtcgattcctgggggacagtagagcaccgtggttgaaagaataacctaagcatctctgaatctgctccatgcacctctcagttttttacactgtgatcccatttaatcctcactgcaaccttataaagtagcaatgcatataatccccagtgtacagttgaggaacccgaggtttagggtcatacccaaattcaaactcctgaagatggcagagccgttttcaacccttagcctacccgtcctctacttggtggcccagcatggtcacagggccaccctgcagtggtgtggtgcctaagagctcaggaaagagtcagactgctagatccctagctcagctgtgacacttgctattcgaatccccatctctctgtgcctcagaggtcttcattctctatctgtaaactgaagataaatacactatgttttgttgaattcaacatgccatcacttgtcaaatgtgatatcattttaaatgccactaaaacagaaaaaatgcccaacataacgtatttaatagaagttctccacataaagccaggacacaaaggccgaggcccctgtgtatcagtaaatgagaaatataaacccaccatgtaaacaaagtgacaaggaaattggcatgtctcaacctaggcgccaagtgaagggagaaaatattcttctttgacctgagtaccagtttgatcccagaactggtactcaggcagatttgatgtctgagttcacacggaccagtgtagtccgaaaaacccaaagtagacaatttcactttgacctcatgttggtagtagctctgtgaaacagaagaaataaacacaaatccattctcttgaaattagatctcagttcaggcccacagcgaggctaagatgctaaggactgtaaaacccacgccagtaatttcagaaatttgcaaagatggaaaaaacgtgttgtatgatcattgagatatggtagcatctagctatgagctactgtaaccaaatactcccaagtctcagcagattcacacaaccaacattcatctctttctcaagtaaagtccgagtccctgaatagtggatgagtcagagaactgggctctgtccatcctgtggccccacaattttcagcacacaacttccatggtctccaaggaagggaaaggtgtaggattgtgtctgggaggtttccacaggccaggcatgggtgtgaaatctgtgacttttacccacaatgggttgggtagaacacagtcatatggtcatgcctgggggtgctgggagctgtgggctacacctgtgcctgggaggaagcagaaagaatcttggtggacaggcagacaaccccggccacaacaccccatgggaccagagtgaaactcttggaaaataattgttagcagcagtagattaaaatggggcctgacaccacacagagactcagtcaatgagtgctccagctatgattaataatgagaacatctttcatttgtcaaagcgatgtatttttgaggatggtgctcacttaacaaaagcagcttctcctggtgtttcctagtgacttcccatagtggatttcaaatagggatttgaatttcaaaaaaggtaatctgtgtgcaggagggcctgggtggtaggaggctaatattcgcgttcacaaatattgcattcttttaaaccagtcatcctcacattcagtttccacaggaaagcttaaaagtgtgagttctagaattagtcggcctggctttgaaccacagctctgtggtttactagctccatgacctcgagctaagcccttggcttctcactaagctttggtttctgcagcgtgaactagtaatgaaacaactgcctcagaggctgttgtgagagtgaacacagataatgaaggtaaagcgcacagcacagagagggcacacaggggctctcagcgcgtggggtcattgtttttcttgtaatttttattaatgccctggaagccatttttcctaaacctcatgttagcaaccttgggtttgagccatgtaaagtcctgtgcgctcccctatgccatctcaggtttcagaaactctaccttctgtgcggactgattgtctgagcaaatgctagatgctgggtacatatgaagctctcatgtggacagccttaccaactggtggtctgaacatttatttccaattttaacaaccctattaatagttttatcctgcgaaacaactcaaagcattatagaaactctagtgtaaaacctcacatcactcccagttcccaccgtcggctgagcggaggcgtcggtcacatccatccggtttcttttcttaatgtctagccaaggcccacagagatgagcaaatgcctccgatttataaccaaatgtaaagggcagctctgtcctctctgcaatgcaaaaccaacagctcaatagttggacaaccacacctttccaatagtgtcaagaacgacttctgaactctgaaaattcagtgtttggtttatgactccttaaaatgttttacccatagctcctgggacaggagccagaaactctgcccctgtagaacccagcagagaagaagagctgagggctggtagctgactcacagccagctttctgatgtgcatggtcagggaggaggtgctagggtctcagccttcccttgccccacacttcagctgagaacctctgaagaggcgaggtgatgtcaggaactcagcagcacgcccttgctcctccattccagatgtaagtcaactcagtccctctgcaggcagcaagcattggctttctgtcaatatccattcatccaaagtgtcccccaaaaccaccctcttacccctaatctcagtgccttgttgaggatggggctgatcccacccctagttctagatctaggctcaaaccaccatcaactcccacctctgcgagggctggttaagggatggactcgggacacatcagagacaagccatgctaaccccaggacctcgctggagcagccgggagagagaggaccttgctttgtcctcctggacagaagcgggctgtgtctaccacactcacctctgttctctatccagggcagaaactgagaatggctcccacacacaggaaaggaaatccagaggtggaggaagggagaaaaggagagacaaggagagggaaataaacctggtccagatgacaattgagcctcttatacagatgagcctgaggccagatagactttgcagtttagggacctgatatattcccttggaggcactggttaagttttctatcctgtagccaggaaggagtcttgtgtgatgcccccatagactgtttgcttattgcaatggctttgcgccttcagctgtcctgaacccaaacctacccaaactcctacccatctctattcacaccacccaaaccagctatgttgtgagcctggcattgtgcaaagtctggaggatgcagagctcccatccctccactttaagagatgtcagtacagcagtgcagtgcaggaaaggcagagctagagctgcgcacaggggtccaagaaggcttcctagaggaggtgacactgatttccactgaaggacacatgggagtttgggaggtgggagtgaggagagtcatgggccagaggcacatagaggacacacagcccacagaggacccctttcctcactcctatggaccctcgtgcctggtttcctccttgttttctgaagtcaacctggtctccccagatattttcttcaagtttcctaaagttagctgcagtgtggtatatttcagagacaggaaaggtggccacgtgcacaagtggcatccaagctccagcctctcccaaactccatgggtgccaggtctgagagctgggagttcaggccccatgagggactatgcctctcctgcctgcatcatggttctcttcctttttgctaatttcagaaatccacaacataatggaataaacatctatgtgcccggcatccatgattagcaaatgaaaatacgttcttaattgtgccgaaattcatttttcataaaagaaacagaatttcacagatttaattgaaatgcctctccccacaaacattcttatattttcataaatattttaattttcttttggtgaagagatatatctagtcccaactttatacagactgatggatagataggtagattgaaatgactgatgataaagatagatagattgattgaattactgatgataaagatagaatagacagaaagatgatagatagataaaaatagatagattagatagaataaacagacagaaagtgatagataaaaaatacataaatatatatagatggataatagataaatagaaaggacagataaacagaaagatgatagataaaaagatagatgcatagatagatgatagataaatagatagataaatagacaatagataaatagaaaggatagataaacagaaagatgataattagataaaagataggtggatggatagatgggtgatagatagaaaggataaacaggcagaaagatgatagataaaaaagatagatgatagatgatagataaatagaaaggatagataaacggacagaaagatgatagataaaaagatagataaatagatagatagaaaggataaacaggcagaaagatgatagttagataaaaagatatagatagatacagacagaaagaaagattagattgatgaaaagataatagaaagattgatagataaacagaaagacagatgatagataaggtgaatagaaagagataggacagatacacagatagagagatagattagtcatagatatagatatacaacagacacattgctttgtgagttgtaatttacataaatgccatcacagcttatttctcaacttgcttcttccatcagcattaatttttcgagatagatccatgttgccataactgctgcgtagtagtccaatacctgactatattggaatttatgagtccagtctcatgctcagggctatttggtcgtttcttattcttcataccactaacaacgctgctggcaatgcccttgtgcacatctctgagaaatgctctggggcacgtgataaaaacacaggtctgggtcacagaccatgcacatctttgattttatctcatgttgccataaggagagcagtgaccatgctcattcactctcctgccagctgagcgtgagttttccagctgcttcacttcccaacactcaggataaaccatctgactttctgagttttgtcagttgggtacctgtgaagcaggttagcacctttgtttgactttataagcatttttcatttatttttgttcattgatggtctctcttctctgaaactcctggtcttcaccttttctccatttggtttatttgtcctttgccaagaaaattcacatgtaggacttcttgacatgttctgggcaccgcttcctcacctgtcttcttccactctggccttatttgttaacttggtttatgatgtctcttgcaaggtagatcgtgtgtgtgtgtgtgtgtgtgtgtgtgtgtgtgtgtgtgtgtgtgtgcttgtatgcatgtagtagtcatcacagaaccatcttttcctttatgagctgtgttttgtgccttgtctaagaagtctttctctaccccaagatgataaagacgtgattatcaatgaccttttcaaggttataaagttctgcttttcagatttagatcttgtatccatgtggaaatttgtttctttacaggatgaggttagcaactgattttaattttcttcccataggaaaactaatatttgagtctcctagtgtgtactaccatctccatccatcaccaagttcccataaatgtgtgggtctacgtgtaggccagtgcttagcagacatttttgttaaaagtcaaatagtaaaattttgggctttgccagccacatagtctcaatcacaaagactcaactctgctggtgcaggggcaagcagctcataagggaatgaggacagccatctcatctgttctgctaatatatttatcttcaaggcaatgccaaacttttaacacttattatgacttcctaatatggcttgatatctgatagaggaaataccaaccctttctcttccttttttagaattatcataactaatcttggccttaagtcttccacgtaaattttagaatgattctgacaaattccacaattttattttttttgagacagagcctcgctgttttgcccaggctggagtgcagtggcacgatctcagctcactgcaacctccacctcctgggttcaagcaattcttgtgcctcagcctcctgagtagctgggattacagatgcacaccaccacacccagctaatttgggtatttttagtagagacggggtttcaccatgttggccaggctggtctcaaactcctgaactcaggtgatccacccacctcagcctcccaaagtgctgggattacaggcatgagccgccatgcccggcaattccacagaattttgtattgggtttttaaaatggaattgcattgaatttttaggttaattgggagtggggggaacacataattataatatgtgttcacatcatcaacatgtttgtttggtttatcctaaggacacatacacagggcccctctacctggtgtctgattcacatggtgacaccacctttcccatcacctataccagaaagctgccagtttcatccccaccttccctcttcttcctcctacgcagccaggtacagcattgcctttcccctctttctggggtctcctctgtctctctcatcattgctggcctcaggggtctccctccctccaatcttcttcctcccatttcatctccatggcgcaccaaagagccctctcttgtcacccacgtaccatttggctgaagcagagctcaatatccttagcacaacttgccagaccttgtttggctcctaacctacttctacccctcaccacctgacccgctgccccctcaaggcacctgacgccccagctgcacagacactggcagctcctcccattcccatccttcctcaagcctcagtgccccccacccagagcaccccccatttttacccagccactttctttcttttattttttaaggagtcttgctctgtcgcccaggctggagtgcagtggaatgagcttggctagctgcaacctccgcctcccaggttcaactgattctcttgtctcagccttctgagtagctgggactacaggcacccaccaccgcacctggctgatttttgtatatttttttagtagagacagggtttcaccatgttggccaggctagtctcaaactcctgacctcaaatgatctgcctgcctgggcctcccaaagtgctggggttacaggtgtgggccaccatgcctgctctactcagccactttctattcaagacccagctgggccatctctggctctggggctcacgcctcactgccactgttcccagtgccactgacctcagtcactgcacatgtcacttggaagaggctggctccacgaggatggggcaccccaggacctggcatgtggaaggcactatcagtatgggttccttaaaggagtgaaagagcagatgttgtgcacagtcaggaacagaaatggggcagagagaggcaggtatcctcatctcaaatacacgcttctcacagggacagggctgagggcacagagaggcaggtgtcctcatctcaggtacaaacccttctctcaaggaggggtcagagagtgcagagaggcaggtgtcctcatcttagatacacacacttctcccaggaaggggctgaaggcacagagaggtatgtgtcctcctctcagatacatgcttcccccagggagggggctgagaatgcagagaggcatgtgtcctcctctcagatacatgcttctcctagggagggggctgagagtgaagagaggcaggtgtcctcatcttcggtgcacatgcttctccctgggaggggctgagggctcagagaggcaagtgtcctcatctcagatacacacgcttctcccagggacgggctgagggcacaaagaggcaggtgtcctggtctcaagtatacacacttctcccagggaggggctgagggcgcagaaaggcaggtgtcctcatctcaagtacatgtttctcccagagagggactgagggcacagagaggcaggtgtcctggtctcaagtacacacgcttctcccagggaggggctgagggcacagagaggcaggtgtcctcatctcaggtacacgcgcttctcccagggaggggctgagggaggagccagccccaccatctctgtgccttgctgacccccagcgtcctgccctgaatgagcaggctggagctgacagggctgaaggggatgtctgcctgcgggagcagaaggcatgcataaaaatgcaaatgccaggctcctttcctccctgcgctctgctcgtttatccctctcagacagataaaaaggaaactgtgccactgaggacagagcccctctgggtaaaaaagcaatagcaaagtgacaaatgtcatgtgggtttaagctaagtcccccatcgttacaaacccacagggaaataagcctgacaaatgcgcagccccgctcgctgcaccctcttcctttgaaataacttgagccctgaaaagggagaaagaaggaaataactcaaaaatgttaaaagcaaagtttctgtctgcaaaccaaatgggctgaatttttataggctcgtttggaagagcatgaaaaatccagttgtcagaggagcctctctctgccagacagcctcggggagagacacaaagggactacctaaaacctaagctgctctgctcccctgctcccatcccagggctcagcccgctctccccagcccctacccttgtcctgagggctgctgagccaaaagggagggctcctgtgcagggccaaggtgacctggagccgctctgatcccaggctcgcggagggcactgtggaggaccgtgcaggaagacaggttgctcctgccagttcaatgcactaagaccacacggctcccctccgcacagccctcgctgagtgccaggcactgctctaagcccttggcatgtcctttctccttcaatcctcacagcaactctatgagggaggcattatgattatcccacttcccagatatggaaactgaggcagggaaaggttcaggtgcgcaaatggaagtggaggatttgaacaaacacaggctctaaagctccctgccacagatgctggcagggtcccacccggtgctcctctttactggacagtccacagcacagcacaactgctaacagatcacagctaccccttccgagagaatccactttatccagagatgcctgggagatcgggaccacacgccagggggcttacagccaagcactgactgactggtatacaaaagccccacccctgcacctcaaagggaagagaacgctggtgctgtcccctcccgagtccccatcttagcctggccttctttccccacaggcttctcctgagagcacaccctcgacaaaacacttgcacaagagtccatatcacaggccctgtttctccagaacctggttacacaccagcccacagacttaaattagtccatacattcttttttctctctgtcccttaagagatagggttttgctctgttgcccaggcaggagtgcagtggtgcaatctcagctcactgtagccttgaacttctgggctcaagcaatcctcccacggcagcctcccaagtagctgggaccacaggcgtgccccacaatgcccagatcatttttttatttttatttttactttgtagcagagatgggtctcactgtgttgtccaggctggtctcaaactcccggcctcaggtgattcttcttcctcagcctcccaaagtgctggaagtacaggtgtgagccaccttgcgcagcccatacattcccatctaaagtgctaaatgctgtgcctggcacacacagctgctcagaagtgatattcacatcaatgatgagggcccccttcattgttctcactccctcattcatccacaggccatcttcggggcatctgtggcttgtttagtaacttagtaacttacactaggagttgagaatgaagagtcatggggaaaagtaacaatcaataaatctactttttttcctacaaatccttccaaattaagaggtatattcatgcttcctggagccaggagtgcaatgattttcctcctccctcccccagatgaagggcccctcctcagtggagacgttagcctcattaccagcccagactccacttaagggtttgcagttggcaggggttcaccccccttgacagcgaggcattgtgctgattggggaatgaaaacagaatgtcagagacctgccgtgctttcctttttgatcaagtctgtgcagcagaaatgagagagcatccggcatcagcatccagactcagcgcgctcatcccaccgccctgcagtgcacctaatgaatctcatttactggcaaagacaatgaagtcgcccacatggcacctgccggtctcataatgaatgtcctcccccagccgttgggagtgagccatctgggagcggggcgccataattgggccagcacttgcatgagaacagcctccagtggggaatgttgtaagacacttgtcccagagatgtcgtaagagggcaggaaggagctgttttcaagggaagttaatggtccttagcagagggatgtgaagggatcatctccctaagcaaagccccggcacagctctgcctattgtgagaggtacagcagcactggcttgggacaaactgtccccatggcctcctgggaatagagctgctttcctggggaggcccacggccatgtggcagaaggcagcaggtgtctcccaccaccatccacagaggcctggaattgcgatgtgaagtgagccatctctttgcaagggaatctttggaggggcaacatctttgcttggcttagcgtggatgatgctggcctgggagttggaagacctgatgggatgctagttcagcccttatctgggaggtgggcttgggtgagctctccctcctcctagggtttttcagggtgtgcacccacagagagaaataaagcatggggcacatctgttgtatctaaaaccaacctaatgcaatggcttacatgaaagaaaaggcgagtgggatggggcgtgggatctgttagcaaacaacactaaaatatccgggagtacattctggcatggcagtggtctagggactctgataatgccattggggtttcatttggctctgtgtctcagttctatgctcccctgttggacttcttccctggttggctcttcctccctggtagaagggatgtgcaggttctggtcttacacatggaaagggacactctccttcacttgagcccaaggcttgcctggaccccatgggaaatatataaccatcctccaatcactcactgcatctaggggaacttggcatcccggtatctaggctgggtttaaggcaaggagagaaaccagcccctcccagctgcctggatggagaatgaaggagggatgactccagaagaaaagtcaccgaaagggggagtgggtgtggagcagggggaggtgggaggccttctgctgggcttgaagcagaagctgcttcagagaatgcacaaaggggcagggtggaggctgagggcatttcagacccgctccaccaccttccatttggacattggatagcctttttccaaagtcacttctgatctttctgcaatcacccatcaccgagctgccaagccacaagcttccttatggtagaactgattggctgaatgtgcttatctcagctgaaatgtgtggaagggaaccttactctccaatcaactgtatctctcttggttcggcaaacatgggtactgtgccactacgttctaagcaaggggcagaggagacaaagctctgtggcttttaggagatggagtcacgaagacataaaagagagttttttacttcagagggcctaggactgggagaggggagtggagaacagggatgttcctggagagagggggcatgatttattctggtgaaattgagacacggatgggaagcagacaggtgagatgcaactctagctggaaaaatgaggcattttgtaaaagattgccagctgcagagcctagacttgatcctgtaggcatagggagtccttgaaggttgtagagtgagagaagggcttgatcacaactctgctttaagaatgtgagtttgacagtgacttataggatgaagttttgtgtgcttgtgtgttttgtggagtggggatggagggcacaggagaaagaattgagaagcaaaaaatgctgtttggaagctgtttcaatacccaggagaaataacgtctgttttagagcatttggggcattagaggaggggaaggaaaacaagcatctttaatatgacctcagcattccaaaaatgcgttcatatccatccttatccctaggatacaaacgtgctgggaggtaagcagaatgagtagcagaaattccattttacagatgaaaattgaaatcaaaagggcaagagttacacccatcagcaagggacagaactgaagcaaaaccagggccaccaacctcccaccaccccctgagcctctgtgcaggggcacctgaaccctgatagatcactgctgttcccacctcaggcaggtgacgggagcccacctcgacactcctaacagctaccaaataaagcaatctgtgctgctaatactaatataaggtattgattatcttactgcaggagtcctgagatggtcagctctggctgccgaggctggcggcagcagctactaaattgtgtttatgggaagctttttacctgaaggggtcataattcactctcgatcaataaccgatcaatccacctgctttgcacattgcaaatcctccagatccgtccgcagagagaaagagagaggaagacaatctgtttattggaaaaagatggcagaattacaggctaatgcagccacttaggctggtgattacataagctttaattttttttttaatttaagtgaagtattttgagtgatatgctgagtccactgaatttaaaaaagaaggatcttggttggtctgaaaggatcagataagaaggatctggtattcattgagcacctacgatgtcccttgccctgtacagaactctctcatttatcctaacagccagcaaaggaggtattattcccacttccactgggaaacctgggactcagcgatgggaaatgactagctcaaggttagtgattgagctgaaaatcaaaaacatcgtctcccaacagggaaataagttaagtcaagggcagctgaacttgaagagcctgagtcccatttcggggctgggataaggtggagttatggcaggaactgcagagggatggttgggagagggaggggcctgggaggcttgcctgggcccctactgccagcacacatccccccactatttgctggtggagttgcagtcctcagacgtgcaggatgcattagagagccatccagggccaccagattccctctagctgctgctctgctctccagcccccagtggcctcccagggcccagaggaggaggccattgagaacctcaagctgcttccccactctctaggaaactccctgcacaaacccacctgactcaacccagccagatccctccccagcagcccttccctggtctctaagcctgagccctctgaaaatgctttctccctcctcctgccaatgaccaaggtccccaactccaagcaattttcagagcgacccacttggggagtgtctgcactccaagttcctccttcctctgagctctagtccctgctctcttgggtccctcctggcagggtggagaggaggaggctgggttggggccactcggctccaagggggcctgcatccttgtccctgcggctcctatatgcaggcccaacaagctcctggagtccagcagccatagatctaaaggcacatcagcctctggttcattctctttcaaactagttcagatgtggagttctcccccgatgtggctctgtctcccttcttactgcagtcaccatgggcagaacagaacttgagtcctcagagacaccatgatgaggttgaggaccgaacctacgatcttgtaacacgaggagtttcactcactatgatggggtcttgcatctcagctagtgccccactcggaagaacagcatcctgataggccttaggcggtgcactggcaccagggctcagggacctcaccatggtcagaatcagatgaaggaaaacagttttccgttaacaactcattcttcctgctttttttgctgatttgttgaaaattattttccccctaccgtttcacagctaattcattgtccctattgaggccactaccctgattttggagactgtgactagaggcaaccgttcagccttcctggaaaatgtctctgtttgggtctctctgtaataaggaattgcacgtggcattgatcatcaagaactcccacagcattggctcaattagcaaacagttaaatgtggcagattgcatccagatagcctccctcggagtgacagatgtctgcagtcaacatagggaataactcccagagattggctgaggccaggcccaacccctccctggtggtcagagcaaactccagtggcctcaggccccacacttctgcacagggaggggccagctgttcagtttctcccctggagccccttacctccccagggagagtcttggggatcagcaaacctggactatttgccctgaatagtcccagtccccttggagggaacccttctctgcagaaggcaagggctgagtgtgcccccagatgtcagcccagtggtctttgtctcggctgtgcctaccttcctgtgacagctgtagagacagctgtaaggtgacaccatcaatgcttttctggttaattaactaaatacgcattgcctagggcctcagtgtgagtaagtttcaggatgaaaagtgccaattttcctgcatgtatgtgtccaaactattttccttagcagttcttactccctttttctcatccgttaagtcaagtagatgtgtagctcagctgaaaggctcagaatgacaggcacatggaaccactaatttagataaatgatgctgttcctgcttcctggagacacacctctcagcacattccagggcctgaggaactcagagggggccagcgggagggtgttacggctgtttcttgtgtaggaattaattaagtgtttttatcggctacatattccccctgagcctgttttattctagatgatgttatgatcttaatgcttatgtctctccaaaattcccacattgaagtctactccccagtgtgttggtatgaagagatggggcctttggcaggtgacgagggcatgagggaaaaggaggcccgtctgtccctcccactgcacaaggacatctagatggtaccaatggtagaaatgggtccttgccagacaccagatctgcctgtgccttgatcttggactttccagcctccagagctgtgagaaataggttcctgttctttctgaatcactcagtctaaggtattttgttattgcaacccaaacgcactaagacagatgttgagagggcctgttttacaggaagagtccacgtggcctaacggcttcctccaagagaaatgtggtggtcaactgcttgcccccacctctcctctgggttctgagccttgcctcatgaggctggcctccaaggactccatccccagggcccttgtgctggctggcctcgacttcttcagaggtctaaaggctgaaggccccagtggtggccaaaggcaggaaggctatggtcatgaaagccacctgtgtggatgagaaggcattatgtccaggctcccatggctcagatggggacaccaggtcctgagaaagaaaaggagtcccaacagtggttggaaggaagatggcaatgaggactaagatggccacacctcggaaggaagatcatcctggcctctctctctagtgccccttcagcagctcctccccaaggagtcgtgatgtcctggagagtcagcacattggaaggttttctgttttaatttccctcccactcaaactatgattttccgcatatctggagcaagggaggcccaagcccgggttctcttgggcagcagatgtgggaaatgctgagtacaggagctcagatgtcctcctagggtcaaaaattacatactggggagaacttgcccagcttggaagaagcagaaaatatcagcaagaacagagaggataactttttaagagtaaaaattaagtgtatttatgtcctacacattccccagagcctatttaacattcagatacttagaagatctacctggattttgtgcaactctccttttagctttgctgtttttgttttgttttgagactgactctcgctctgttgcccaggctggagtgcagtggtgagatctcagctcactgcaacctctgcccccaggttcaagtgattctcctgcctcagcctcccaagtagctgggattatgggtgcctgccaccacactcagctaacttgtgtatttttagtagagacggggtttcaccatcttggccaggctggtctccaactcctaacttcaggtgatctgccctcctcggcctcccaaagtgctgggattataggcgtgagccaccatgccccacctagctttgtaattaaatgtaaaaacaaataaacaaacaagcccctccaagctgctgtataaaaagccctcttaaaaaccatcccttgtagggtctctctaaacacagacaccaggacacatgcaggctcccaacctgtaaccagcagagaggctttcagagatgaagatgaatgctgcaaatccagccacaggtcatgcaagggaatctggactgcacagggaaggggtactgtgttcatgttgggggctctcaggatgtggctgctggtcaggagagggctgacaaacagtagtttgtatttcatgcatctgcagaaaacagttaaagagaagggatactgggcctggttcagcaaccggtccaggccggtcagccttgtacaaactccagatccagtgccctggaaagtgactgtgggaggctcagcgtgcttccaagattgggctaagagatgccagcccttcctcagaaggccgagtgggattgcagcaagggttctcttcagccaaggggaaataactcttgcttcaagaatccagacaagcacatcacaaaagcccaactgtgggctcagagaaccaggtctctgcatctaacctgacatgtgaccctaagcaagcaacggtcctgcgtagacccttatttcatccacctgtgagtgcagaggaataacacacaaccctcactgcatcttgaatcccatctgcaccctggaatcccaagccctagcccaccctcccatgagtgtctcaacctggaattcctcattagagcatctggctgccagctctaaaggacatctgtgtagagacctctgagttagggaaccccccgcccgattttcccaatgcttcagcaccatatcttctctaggaaatgcccatctatagaaaatgaacgacaggggcagcccaaacagggtcccttgccagagttcccagcagaaatctggcttccctccctgcccccgcagctcacccgagatgacccaacaacatgctcagccttaccccatgccacctcctgccacctttgcaagccctggaaggaaggcaggattgttcttgatttatgtacaaagaaactgaaagatagagaagttaaatattttgcctcaggttctgcaaagggagagaagaaactgggagtcaaccgaggaccatcaggctccaagctacacacacccagcttccagtcaccaggtgtatatatttttagagacaaagtctcactgtgttgctcaggctggagtgtaggggtgcaatcatagctcactgtaacctccacctcctgggctcaagtgatcctcctgtcttggcctcccaaagcactggaattacagggatgagccattatgcccacactgaccacacaccaggcacgtgaagatggagggatggacgaatgtcagaaggagcccctgtctctagggagctgacagcctagatgagcagacgacatgcaaaaccttttaagaggcagggagagcagctggtgggagtccttgacttcccatatgggcacaaacattccaaagaggtccctgccatggtgaaaaggcatggcgcccaccaccagcaatccagcccctcgccctgcctttcagatgtgcattggtcacagaagctttactcccaaggctttcagaggacagaaggctagactccagcatgagttgggcatcattcccaaaagaaaactgcagtcaacctaaggggcttatttacagacaacactcaaagccatgacactttacttgaggcctgaatttgcttcctcgtgtgaagaaagtgacccctatttcagcccatgcaaactcatttctttctgatgcactttgaagatttggctctatggaaaagtgcttggtgaggggacagaggtgagggtgaacaaggagatctcatctgaacttgttccccaggtccgcatcacagcggcttgattctggctccttgaaatcctgtccacacacaacaagataaatcagagaatggaatgaaatacaacccctggaaattttcaaataatgaaaaccaaaggtcggcagtaagaatcttttctactggggtcaaaactcagttcctcttcccccctcttcctgcccaatttcacataattagtctctactacattgtctttgggggttccaaggaccggacattccatcatagacctcaaatcatgagcattttgcttccacgcaagttacagttttattgccttggctggttgtattgaaaattaagcagtcatttcagggggctttctagaaatcagttacacccatgtctcaatgttgagagagaccaaaagagaagaaacggcacaaatgtctatatgtgatgtcatcagcacccccagtgtgccatccccatcccacacacacatacacacacagctgtagactcacagttctctttttattgtaaagatgatttccctgaagtatttttaagctggaaagattttctacaagctggtgaaaaatcgctcactgcaggagatcctatgcattggcagaaatccagcaaccccatgtattggtaactggcttggtaatgagtctcttccatgtaaattggctcattattatcaatttttgtcagctcttgagtgagtcttgatctgctcccccgtctcggcccaggtgtcagcatgaggcgaacaggagtgtccagatctgctttccatgccaggcacctaagacctcacatctcagggaggacggagagagtgaggatgacagactccatgccattagagctttgaatttaacgtccagaacagagagatgttaaggagacttgcaatgaggtgttataaaaaccaagtttgactgaaagagctggcaggcgatgcagatgaacactttgtcctgtgattcattgctatcaggagaactaaatttgtacagcccagaggagagatgactaatgggaggcataataattgtcgatttatacctgcgaagaattaatcaagaggcccagaggagagagtgttcggcggccactccaggtgcaagtgctgggggtgggcagagccaggaggagccagagaaattaggctaaatagcaggaatgactgtaataacactgaggtccattaggcagagacattgcatggcctccaccatgggatgctacgggattgccatcagacagacctgcacaaggcaacttggggaatagatctctgcaatgatcggtggatttgacaatgcgtctggaagattttagggtgagatttcctcatcccggggccacttctcagggaactgaaaagctgcctttgttttgtagacaaaacttccttcactatttcaattaaatgtgtcttagagcacgaactgcagaaaaatccctgtccagtgcaatgtgggaggcagagggagtttgtcatccttagagtccatgaatacctactaaacacctactgtgtgccaggtggtgcaggggcagcctcctagctgtggggagcttgtgtcccaacccagggaggcaaagacagcaggagaggcaggcaggcccccaggagagtgatgctagctcagccaggctgcagatgatgcccaaagagaaccaggtcaacagccaacacctctatgcaggttttttcacagattgggcccttcacaagtcagtctcttttcctataaaggacaggcaattacccaaatgtgattggagaattttgaaggcttaagagacctctccctccttcccaggcctcctcatgctctcagcttgatcaccccgcactgttggctcataagcaagtaggctgaagcatgcagcaatgttgggaatgttttgttttgttttgtagagatggggtcttgctctgtcacccaggctggagtgcagtggcactactatggctcactgcagcctccggggttcaagaggtcttcccacctcagcctccctagtagctgggactacaggcatgcaccaccatgcccaggtatttatttttattttttgtagagatggcatctcactatgttgcccaggctggccctgtactcctgggctcaagcgctccacctgccttggcttctcgaagcactgggattacaggtgtgagccatggcatccagccttagtaaagttttaaattaggattgccaatgtttaaaaaatgggagctgccatacaaattcgggtttctaacatgtttggcaaactgaactgatgatgccagaactgcgtcctccacgggcagcatcagccatggccgggaacgtgctgcactttaagctctttcatttgctgcagtccccattgctcctgtttgtgttacagctggcctgtctcattctctcattttcctggctcagcttctgtgggaatttcagtttgttgccaccctgagctaaatgaccagaaatgcaaggtggctggcctgtattaactttagagtcttgcagaaaggctcctaatcagttataaaattcagtgcttgaatttgatgaacatcctcagcagtcacttggaaaacatttctgtgttttgcaaaactgcaagcaaatacacaattaccctgtattctttcctctagagcccacgctctgaatccttccttctgctcactggtagcatgaagcttataactttagacaagctcgtttgctcccttttatttgcaaaggaaatgtataacctcactgagctttttttttttttttttttttgccttggctgccaggagcctcgtctagcaatgctgagttgcggttcatggttcagctcaagagtttgttgcattaatccctcaccttccccgaactgatttttctttttttttctttcttttttttttttttttttttgagacacagtctcactgtgtcacccaggctggagttcagtggtgctatctcagctcactgcaacctttgcctcccaggttcaagcaattcttatgcctcagcctcccgagtagctgggattacaggcatccaccaccacacccagctaatttttgtatttttacaagaaacagggtttcaccatgtcagcccagctggtctcgaactcctgacctcaagtgatctgcccgccttcgcctcccaaaatgttgggattacaggcaagagccaccacgccctactccctaattgatttttttacctgtatttctaaccagtgagttttacatgttttctttgtaatattacaagctgcacttgatgctttttgaaagaaacaaaaggaacacctggaacagcaataaactgcaggaatgtcccagaagaaaactgggatggaccctgccctggagctgggaggcaattagagggcgggctgaggcagaatgatgatgcatgcagcaatgttggcggctgctcccagccacagctgacactgtcagtggaggatgcagttctgacatagttagttcagtttgcctgggtgacagagcaagaccccatctctaaaaagcaaaacaaaacaaaaaaccccgacattagtgagctggaaatgtgcagcgaggcagcttggaagcaaagctcgggatcgtgtggagaaacgtgtgtccgatattattcctccgatgcaccagcaccatgattcctaccacaggcctgcatggtgggggtgctggagtatgcagggaggagtcagacaggcctccagcctccaggggtccagtagaagaaaaatagcagcttatagctgctgctggaatgcaccatgcatcccttggcccccagatttcagcccagctgcagcagatgggaccctgtgtttgccagggtcctgcctcaagcatggaccgaggcttcctcaatgccacaaaacactgctcagccacacgcaggctcccccaggatgtttgggggaatccacaccagggcagcctcagtcactgggaaatagagcctcgccctcctgggcctccggtgggaagctccggtggggagcacattcttcacggctccacaggaggtcctagaaggctaaggccagggtgcccacagtggccacctgccgagtagcacacccttcatggctgctctccctctccttctccccgcccccatgtccccattcctgcctcctgggattgcccccgacatagatgacctgcaaccaggttcttactccaggatctgcttgtcgaggtactcaaagacagtgccagaggagtgtaactgaggctggagtatgagctgagtgattagaaacggcttcaaggaccaggagacgtttgaaccagcaaaggctttgctggacaagcagagagggaagtgaggagagacacattccaaggggaggcccagcgcaagcggcagagagaaggcacccagccggtaaaaggattggtaagttgttccctttgtccagatcatgggctgcatgatcaaccctggaaaatgagatgggaaaatagggtgagctgggactcccatgggctcagatgtgccactgtggagtatgagcttcattctgtcagtggtgaggatggtgtgatttggagaagcagttgagcggggaataagggattggatgacagattcggacgaagactgtctggggaaggtgggccgccccggctgccacctctggagtgggcattttcaccatgtgatccaacagtgctgtggtgacctgtgtcctctccatgctaggctccaggctgggtgctcacagagtgcctgtatggctggcaggtatggcgcagctcctgggctcatggacgaagagtcagaattggtggatacaaagttgctacccccaggcaggccagagatgctgatcaaaagtgctcaggtggatgggaggtcatttgaactgaccctggaggggcatatcccactctccccacagccaggtgggctccaggtggctcctgagtggcgtgccatgagcttattatagggttggagtcaccctccttgtctgggggtggctgagaccagcatggacaaccccaaaacacagcttaagagtaaaataactaacagaactttagaattaaattacatttactctcacatttcatttgcccacatgacatcaaatgaccacgctgtctcttttctctccatgtaaagtggccccctgtggggatagcccagatgtgtggctatggtgaggacaagttgtggaaaggcagcctaggctctgagtcccaggtcggcctcctcactgtgcccgaatcccctgtccccctcacccggactgccaggcggcactggtttccacagcatccatgctcccagaagaactggaggttgactttaggaacttcaaactcaagcttcccatattcacacatccccgtttctgagctgctttctcttcaaaaacatatttcttactttgaggtgtgaggtctttgtaaagtgtattctgagaaatatgaattccacaggtcattaataggtgttcctttaaaataatgattcacatttgctataaactgaatgcttccatctcctcaaaattcatatgctgaaatgttaacctcccaggtaatggtattagggggtaggtgttttgtgaggtgattaggttacgagggtggaaccttcataaaaggatcagtgccttaggagaagagacatgaaagagatcacttcctgtctctgccctctgccatgcgaggaaacaggaagatggctgtctgcaaacccggaagcggctcctcactggacaccttgaatcttggacttctttacctccagaaacatgagaaatcactgtttgttgtttaagccaacttgtctatggtatcttgttacagcagctcgaactaagataaaatttagacagctttaagaaatgatgtgtggagcaaaatcaaatgggtttctttactactggacatgtcagagccttccatgtggggcctggcaccaagtgaaaacacaggacctgtgttcagaaagtataaagaattgcaagaccacagaacgtgacactaggcgcagagccctcctgagttggagcccgagagcccacacacatctcacccctgtgcagccagccctgcaggataagccaaagttgccgtgcacacctgcatgtgcagtgcatgctccaagaatagaaaagaggcaccagaccgaggtcacaacgtgttcctaacatattcaaccactgattgacagctctgcagaacacacttagggaaatcctgcttacaactgagttctcattttcctctaatttccaagctccaatactcagacatacagggaaaatgagtagtttccaagaaccccacgggacagttgtacatagaaagggaagacccttttcatctgctagatcttttttgtctcataactgggttagtgttttttatttggggatttttctggaaagtgaggtccactgataatttctgctcattccttattttcttccattcttttaaataaagcccagcatctctgaactacgaaaacaaattccaggcaacagtagcaggcaatttacagtgatagatgaatataacaaaaaatagcacgcttcagctggggatggtgggcagtgtttgttcttagaatgccagctctgttaaagagctgtcgggcctctccaccttactctgcccatgcaagaggccccgtgacacccctaggccactggcttccctgattctcttttctctggttatttatgcctggggagggagtgggggtaggagatgagggacacaagccttagcactgagtcacttaaaagtgggtggagtcaaggctgttccattaactcccactttcctcagtgccctgcttggctggagggaccccacccacactatctccagctgctctgactcagaactgccaggtccgtgccactgtcatttctggcctcccactctgtgctcctccaggcctcagagttagctcgtgctccgctcctttctaccccatcctccttccccactgtctttgttagggtgcccacctcctgaaagaagcctactggtttgttttgttctttgagacagagtcttgctctgtcacccatgttggagtgcagtggcacaatcatagctcactgtagccttcaactcctgggctcacgcgatcctcctacctcagcctcccaaatagctgggactacactactaccaccttcatgcccacctaagtttttattttatgtagaaacagggtctcgctatgttgcctaggcctgtctggaacacctggcctcaagtgatcctcctgcctcagcctcccaacgtgctgggatcacaagcctgagccagcacacctggccaggaagtctactgtttagctgggagcaggccgcatgctggtctgggcaggccagctctttgcatctggagctcacaactctgtttaccacagacacgcactgtgcacctactgaatgtacgtgctgtacacttattgagggcccctgcatgcaagggccctgaggacaatttctcacgaggcttgcagctcctgcccttgaaaagcccaactctggtaggagacaggaggctaaaactaacatgcggagcatcccacaccctactctggcttagcccctcccaggaatgtccgtcatctgctgtttacaacttcaactcctcagggggcccttttaaggcccctcagcatctggcctgatctctacctcgcctgtccctgcccctccttacccctaagcttgcaagttccacccttcatgtgggcactcagcagagcatcccgcctccccagcctctccctgggtgttcttccctctcctcctgcctggaggacaccctctccccttccaaggtgcacttcaagcattcacttctctaggcagcttttcaccgtccccacctccccaccaggtgagggtaacagctcctcccacctcagtgcctctgctggaccgacacaggtctctaacacagacccagccaatgcctccctggcagaagtctgtctctcccgccaggccacgagcaactgaaggcaagaggggtctgttcatgtttctttcccaaagccagggcctggtggtggctactcaatacatcagtgatgctctgcattaatagcacagatccagaggaagaagagaagtgggttaaagggtgcaaacatacggtaagacaaaaggaataagttcagtgtctgatagcagggtggggtgatgatacttaaccaaaatgtattgtactcaggcgatgaatatcctgaataccccaattctatcaccacacactatatacatgtaacccattttctcatgggtttttcataaatctgcactttttaaaaaaggaaataagcagtgtattaatctgttctcatgctgctaataaagacattccagagactgggtaatgtataaagaaagagtttcaacagacttacagttccacatggctggggaggcctcacaatcatggcagaaggtgaatgaggagcaaaggcacatcttacatggtggcaggcaagagagcatgtgcaggggaactcccctttataaaaccatcagatctcatgagacttattcactaccacaagaacagaatgggggaaactgtccccatgattcagttatctccacctggccccgctcttgacatatggggattattacaattcaaggtaagatttgggtggggacacagccaaaccataccaagcaggtatgtgcaaaaaaaaaaaatagcgcagatccaagcacctcggtcacaagccctggtcccaaggggcaggagtgacttttccaagctggaccccaccaaggcaagtggcagctatgaccctctttttcctcactctcatgccctctacactctcaactctgcctctcccttcctagctcagctttcatgatgataatctcagagtccacagcactgtgttagaagacagagaagagaaaaagaagctcacagtcttaagggtgacagccctaaaatattgagttagaaattgcctggggactcgacttcacagtcatggcaaagtagatgcaaatacatattcaaattcaatgcaaattcactggcaaatttcctccctcctccccaggacccagtgaggctggcagggcttggatgggcgatgcttgcatggcagggcctccctcctcctcttagtgccctccatggtacccagagctgagttccaggcagtaagaggctgcaaagaaccagtcccagaggagggcttcttctcagggacatccttctggaggcattgccattgtgaggccttttgggatgggcccatgagggacaagcttcctgcaggaaggagataggccctgtgtgcattctgtatgggaagagaggagccaggagagcaaccggaaggaagccctgtcaccatgcagcctgagtgctcactgcagggaggagaagctgcagggcacatctcaggggacagaagagaggctggtggtgcagaaactcaggagtctgagaaagccagactggttgtaggtggtggagaggaaggaagggaggcagagcaagttcaggtttacttagggctcctcctgagctctctggggacgtccaagaggcctggagctcactgaggctgggagaggctaaccttagccttgggtcacgcacaggcatagatgacattactccaggtggtccttcctgtcctggaggccacatgtcccagagccacagacttcttgtttgggaagaggtggacatgaaatttctgctttggcagagagcccaagatgaggagatgccatcattccgacagcctggcaggcaccttgtcctttcctgctgacttggcatggcagggttgctcctccagccacagcagagcctggccaccagcaacagggctccctagggaggcacatgcttgactcacttctgtgacctctgcaccagtggattgcatggggacaggcttgcttcagcacctgggagagctccctgcgtaggttagtggcagtgagggtgagagcatgctaaatccaagatggccctggggaaacagagccaagctggaccacagagggaactccctgattaagagtgcagcctccacccagcgttcttaacagtgtaagatacacgtaatcatgacttactgagcaccggctacatgctgggcattgtgcacacatcatctctaaccattgctacagccctcaacttgttcccatttcaaaagcaaagaaaccaaagctcagagtggttaagtgacctgcctaaggtcacacagcaaacattccacagaactacccaaaggtggttgttgggaaatatgggggtcctccttgtccttcctctcacaatggtttatagatctgccctgagtgtggttttggtgccttctttggaaatccatgggaaagaaaagtttctccatggggacaaaaagtttcccacagctgggcatgatgaccatgactttagaagattactgcagggactcattaaaggacaatattcttgtcaggatgcaattaaagtccttcccccttccatgtttatggaaagaaggaatgggcagaatggcatctggtgaattcggagccttgtcggaatgcatcactaagctcacggtggcacctcggccctctgctggcctcacaccccctccaggtgcctgcccatcatacagtccagcctgtctttgaggctaagagaagatgattgtcatctccagctgccccacaaatccagctcttctggaaacaggttttctgatgaagaatgcccctcccaattcccagcccacacggctcaagaagtctgacttcactgtggactccacagcaggcacctggccaggcatgacatcccctgctgaaggtcactggcttggcatggacaggcagcccaagcaggcagtcagagccactgggcttcagctcttagaccaccgttaggagcgggagccagttttccctgaggctcctggctgaggaccactgagggatgcctgaggagcagacagcatgaaggagggcagaaccgtcgtgggatcctggtgacactgttcgcatctgcatctggccatcccaagccacaaatcctggactttcccattgatgtaaaccaataaaatctccttgcctgagctacaggaggttctgtttctttcaaatgcagacaaaatattttgacaaattacctctccaggcaattgcttctggtgttttttttttccactctaaattcaactttctaggctacctaagtcctgctgccccatagcagatctcctaacgtctccattatctgacctgttaccaggacatctgggtctccttctgtaggacttgttccccagcctgagacttgatgcctgtctccccatgttaagcccagtgcccgtcatagcaggtgcacaaaagtggtttaaacttgtgcctcctaaacctgcaccccccacctcaacatctaaagcagcatatgaaggtcaataattgtgtactcatctttggaggaatgagaccccctccagccccagctggtctcaccttcacacctccacatgacctcagaaaaagatgctggcatctaagcatgttacacagggcacctggcttgacctctctttgtcaacagaatcagggtgcatctcagaagacctgtagaggaagactcccttcaaaagcccagagcatatgggctgaaggtcacttatcttccatctgtgatgccccacatttcccctggggctttgccatccattggcattgtcattctctctaattaggtaagtcgagagagttggggaagggggagaggaggaaagagaggagagagaactggagaatgcgcattcctaaagatccatgcacaacacatttggagttgccaattcatggcacattttgtaaatttccattacaaaggacagaattgtatcccattccaatagaatgcaaatgaattcctttgtgtgtatattcaatttaaagaaaaatatataaataactgtacaggtggtggaatgattatgatgaatagaggagcctggatcctgagatccacaaacaaccatcattatcttcttgagtgacctgaggtgagtaacttaacctctgtgaacctcggtttatttgtctgtaaagcaagaatgatgcacctgccccacccttctgaactaacagaatgaccgaggctctgagcagccaggggtgctgtgagatgatttatgagccttgaccttgggctgctactggaaaatcaaggctccaccactgcagtggggctcttactaacaaggcttggtagcctattttggagtctgtcccaaaagactgaaataaattaacttcatgagggattttttcccccaaaatagctataatctataccatcagtcatgacagagcacaaaaattcaactgcctacagggctcagtggtcccataagttatggaaaaaggcaaggtataaagcaatagggaagggtgaagactgtggcaaactgttgaatccatgcccttgccccatcttaggggccaccaagctctactagcaggctgtcgcatggggctaagactcaagattgacagaaattcccatttttttagtagaaaccagaagggttgatttttacatgaaatctcctctggttaatttttttttaatttgacgactcaatgttaaaacttttgtaacactttgtgagagccaaaacaatgtatctaggagctagatttcacccacagcccaccaaactctgtttagcaatattgcaatcttcctgttttgattccatttttcaagtgtgtaggttatgttgactttatgtcaaaaataaaagcaagtaacccagcaaatgccctcaatttgaacaggggtttcttctgtcaccctgcacctgcacacaatgaatccacatggggaaggcagtggcgttcactctcttctagcccagtcatcatggcaggctgtgctgttcctgcacctcactctctccacccaactctgctggaccacttgggcctcccagcagagatccctgaagatgagaaggagccctggaatatagtttatatgttgtcccaaggtaaaactggatgtttctgtccatttttgtttcctgaattttacaagctctgcaaattaagtgcatacacacaccgttgctgactgccttgttccgtgacaaggaagtcagactgctggaccccaatgtgcccatgggaagaaaatgtcttaattgcagcccaaacacacacgcatacattcactcaaccaaggcattctgccagcatgctgtcaccacctttgacgtcccttcttgtgggtttgtccctttaatttcttttttttttttttttttttttttttttgagatggagtctccctctgtcgcccaggctgtagtgcagtggcatgaactcggctcactgcaagctccgcctcccgggttcatgccattctcctttcttagcctcccgtgtagctgggactacaggcgcccgccaccaagcctggcaaatttttggtatttttagtagagacggggtttcaccatgttagccaggatggtctcaatctcctgacctcgtgatccgcctgcctctgcctcccaaagtgctgggattacaggcatgagccactgtgcccggctgtccctttcatttcaaaggggtgggtcccttctctctttttcctggactctttattgtactctggccacaaacactatttgctcagcatctctggagggcaggaaagcctctttagaagttaattgggtgaacattcagattgaggggcatgctaataatcagagcatagtaaggggattatgtgttagatttctagataacagtgttttacccccctttttatgtgtcagcaacaataaatcgtctttggaaacaaaataaaaaccaaacccttgacaaacatgcaaacacctggatgcagaactactaaagctgatgactcttcgtgaagtccatagcactaggtagccagtttcctgagggcagcatcgcacacctgccttgacagggccagtgtgctcactgcccagcacagtccagaccctgcccaccaaggacagggactcagcgccagagaaacaaatgattcgatggagttgtaggaggatttccaagaccaccatgcccagcttacctgtatccctacagattaatgaccattttagggaagtgtttgaatgaaggaagaaggaatataattaaataaacgtctgtgaaattagatttttatttaataaaataaggcatcagagatatatgagatgtctcatatatctataaaatatatatgtaagctttatataacatattatgtatttacacaaaaagtaaaataaaacatacacacacacacacacacacacacacacatatatataggcaagatttttttcatctgtcagataggccacaattaaggggtctgccgagaccctgtgttggagagggtgggggacccaggcgtggtctctgcagaggacagcagtcaccaggattgctcactcatccttgggacacgtggcaggatggcacagatccattccatgtgattcctttcaccaatcaaatacaaaggtgtcacttccaagcaaaaagtgggagacacagtccatgattcagtacattcccttttagggtccctgtgctgtgaatctcataattgctccagattgtggctgtgctgtcctcctgggtctcagaggggggacgatgcagaattgagtccctccccaggatccaagacagatacgaatgttagaaagaaataaccctttgttattttgaaccaggacgatgtggtgctgcttatgacccactgcgtcaacaagcttattctgactggcaggaagagctatttggcaacatctacaggaatttagaatgttaatacctaagactatgtaattgcatttttatgatttttacacaatttctttttttttaattttactttaagttctgggatacatgtgcagaacgtgcaggtttgttatatgggtatacatgtgccattgtggtttgctgcacctatcaacccatcatctaggttttaagccccgcatgcattaggtatttgtcctaatgctctccctccccttgcccccgaactcccaacagaccccggtgtgtgatgttcctctccctgtgtccatgtgttattgttcaaccccgacttatgagtgagaacacgtggtgtctggttttctgctcctgtgttagcttactgagaatgatgacttccagattcatccatgtccctacagaggacatgaattcattcttttttattgctgcatagtattccatgatgcgtatgtgccatttacaccatggtgtatgtgtgccatttacacattttctttatccagtccatcactggtgggcatttgggttggttccaagttgcaatttattttacacaactttacttttacacacgtgcaaagtagtacatgagtgagcacgttcatgttgtgtagcaaacactggaaagaaccaagaatatatcaaccagattctctgtctgttttatgctttaatgattaataaatcataaaccatccagactgaggaagagtagacagcccataaagagaatagagcacattcctgtaaactgagaggaaatgtttctcaaaacattgcaaagtagaaaagcaagatgcaaaataagaatgtaccataatttatgtgtgtcatcttcaatttcttttattaatgctttatagtttccagcatacagatttttcaactcctcaaattcactcctaagtgttttttatgctattgtaactggatttttaaaatttctttttttgaatagttcattgttagtgtgcagaaacactactttttaaatattaattttgtggtgagagtgatcttctttgtcttgtctctggtcttagagaaaaagctttcagcttttcaccattgaatatgatgttagctgtgggcttgtcacatatggcctttattgtgttgacatacaatccttctaaacctattagagagtttttatcatgaaagaaccttgaattttgtcaaatgctttctctgcatccgttaagatggtcatgtgttttgtgcccttcattctgttaatatagtgtattacacttattgatttgtatgtgttgagacttccttgcacccaggggtaaatcccacttgatcttttgcaacataggtgaacctggaagacactatgccaagtgaaataagtcaggcacagaaagacaaatactgcatgacctgacttatatgtggaatctaaaaaacttgaactcatagaagtacagagtaaaaatggtggctaccagagactggggtgggagaaatagaaaaagggaagatgttggtcataggatacaaggtctcagagagacaggaggaaagagttttagtgatctatagcacagcaagtgatgatagttaataataatgtactgcatatttcaaaattgctaaaagagtagaatttaaatgttcacaccacagaaaataagtatgcgaggtgatgaatgtgttaagtgacttgatttaatcattcaataatgcatacatatatcaaaacatcaggttgtactccataaatatattcaattattatttgccaattaaaaataaaataatttttaagagggaaatatttggaaaaaagaaattgccctgaagtacttcttgctcattgactgttttcaagtcacaacggaagttaagccacttcatgcactcatgaatctgtttgtccattcgtccatccatccatttgtctgtccatctgtctgtccgttcatccatctatttttctgtccatctgtctctccgttcatccatccacttgtctgtccatctgtccatccatccattcatccaaccatccatccgtctctccatctgtctgtccatttgtctgtccatctgtctgtccattcatttgtccacccatctgtccattcatccatccatccatccatcctcctttcttcccttcctccattcaaccatgtctccatctctctattcatccattaaacataatgagataagtgttggataggttaccaaaaaagtgaaccccattctgtgttggttgtcttcgaaggttggctgagggatgtcacccagaaaccaagagatacttggagtaggaggtaaaagtgtatgtgtttgagagtcagccagagctgtgatacagctgtgctgctttcacaaagaagcttgagaccttggacaagtttcttaacctctctgagcctccaattcctcatctgtaaaatgtgcttaactaatcagtgtagtacaaagactcacatagcccacaactgaagtgaggttgctttttgacgaagtaaagcctttgctcccgtctttcccaggcatttcaaggcctggcttccacccaaggggcagtccctacaggagactggaggaagaagggaaaggcctcggctctctccctattggccaccatggcctggctgctgcccagacggtctcagctcctgctggttgcactctccacaccatcgtccctgcctctactccagatatggtgccaggaatcatggagtgtttgctcttcctggaagcagactcctgtcctattccttgtgagtcctctacaccaggctaacagtctctagcagaatctctcgaggctaccctgatttgagtgttccaggtatgttcagctgaaccctgattgagagaactcatatgtcagtcccagtgctgtgacttggagttacagagttgagaaacaaacagactgccacttcaccctgttcaaggttctctagctcacaggagaaacataaatacaaaagaaaactgcacccaaaactcccaggtgccacgacagaaatatggattcagatctgtggcaccatagaatgaacaggtaccttgcaggcatgaatgtgggtgagagtcatcagggaaggcttccgagagaaggtgacactctatgtgagtcttggagggtgaatacaaactcccttgtaggacaaggtgagaacattcatctcccggaaaatacaccattcaaacacatgaaagtacatgagtttgctacaggaatggtagtttgctcagatgcttgggacccatattggagataagagcagcaggggagaggactgaagtgatttaatgactggtatcaaattgctcacttttaaattttgtcaatcaaaggcatgtcttttaagtggccatctgttatcactcaccaccaggatataatcatataatcttggaataaagaaaagtcctttgtagcaaataaatttaggagggtgtgtgtgtccgtgtgcatacgctacctgcgtgtgtgtgtgtatatacacacatatatatacacacacgcatgtatgtgtatatatatgcatatatgtgtatacacacacacacacacacacacacacacacacacacactacctgtccttgtttttcttttctcattttgcagcagtctaggaacaagtccattggctgacatttgaaaaccactgatctcacctgatcctcttattctacccacagggaagcatgtcattttttaaaaattcattttttaaaatgagttcaattctcttaagtgtttattgctagccctttgactgctcctcacaaacagacccctgaccagccttaggcacttccaggtacttgggttcagacaacacttggtcctaacaccacagggaaaagcattaaagttctcggattactttttctgcaggtcatttgataatactttccactcctagtgaatgctacaacaagcaatatatattggtaattgcagccatctaagaatagacatatttgcaggaataatgacctcctcctccccctaaaaaaaagttagatttaagtaatactgccagttggtggccatttgtgcactcatgtctggttgcatttgcctccagggacagataaatagtaaaggagaaaactgaagtggggagggtctgagtaaatcagtctctctgcctctggctctctctctctctctctttcacacacatacacacacacacacacacacacatctgttattttaaatgtgttatgagtactttcttggtctgggaacccacggactggttcctaggatgctgcaaaatgagaaaaacatggacaggtagtgcatagataggtagattaaaaaggtggggggctgttcagggaccaaggttaagtgtgaacaaagcaacttccgtggagttctattatccatggcagggaggtgctagtgtcatcacagaaggtgaaaattcctgtctgaatgacctttggaagcttccagcagatgttggaaaagattttgcttcttcactaaattgccagaatgttagtttgtatttagaagtcactttgtacagaaaatacaaagattcaaatataagagtcaccctcacctaagccaagggctcacactctgagagggctgtgctgattgagactgaaagagggaaagggagggttgcccttcatcctgcactagttttggggtgcctgggctgagtggagtcatgggtgaaattgctctttctttaagctgctttcattccacctctctccccctgtttcttctcccatgcccccatgccaaagaagagggagttaccttctatcctgacagcatctccttcagagagggttgccttgatgagaaaggcaaagtaatctgatagagccagaaatacccaaggacaagacctcaaccaagagaaggaagaggaggaagaaggggaagtggaggaggaggaggaggaggaggaaggagaaggggaagaagggggaaagaaggagaaataggaggaggagtaggaagaagggggagtgaaggaggaagagctactgcctagtcagtagaagcctggctgttggggccgcagggcaatagtgactgcctcctcacccacccagcccaattatagctgcagtgcctgacagggaaagtctaacccatgctgtccttgagaactgaaccctgaaacatggctgcatgtttgaaacttatcacaagtcttgggatgcttgcagcttcgagccacattatttttaataaattcatttttgaagatttccctgccatggcaaggagggcacatctttgaaagccagaggatctaaattcaagcctaaattgtattctggtctgccataaggccttgtccaagcctgtgccttgcccaggccacggtttcatgctgctgtattgccttaatcagggagctttctcttgccctatgcagctccaaccactgtgaattcttctggaaggttcttgttggttagtgttagtgtaatgccaggccctgaccgtcacccagggtatggccagaacattgagaatgtttgcaatgtgcatgtatagaggcagaaggacaaacattacaaccttttggggaaaactttgagatgccagagatcaacaaagggccagagactggatcatgatatagttcttcagaattaaggctcagctgggcatggtggctcatgcctataatcccagtactctgggaggccaaggagggcagatcacacgaagccaggagttcaagatcagcctgggcaacatagtaagattccatctctactaaaaacagaaaaattagctgggtgtggtggtgtgtgcccatagtcccagctatttgggaggctggggcatgagaatcacttgaacctgggagatggagtttgcagtgagctgagatcatgccactggactccagtctggatgacagagcaagacaaagaaaaagaagaagaagaagaagaggaagaagagaagaagaaggaggaggaggaggaggagaaaaataaagcttaggctggggaagtgccttagctgtctacactagaaattagactatccggaaaactgaacatttattcttcccttctgtagatgctacatggatgaagcccatgacttgaagaatgagcctaggactatagtcttgcaccctccaggaagccttcattcctgctttcagtctgccccaggattcctgcataggtttctaagccatttatatccaagtttgcattggccaaatctcatgactgagtctcacctctcagtgtgtcagagtcaccagcctctttacttgagcttctgacatcccagacaggcccttttcttgcagtcttggcacatgtccaaaccactcccccagaggtgtctgcttggtttatacttcaccaccttcaggcctttcttaaatttttcttctccataaaagatttgaaatcattctgacactctctatccctatctattttcctcacagtttcccttcattttctccttaaaatctaacactagagtgatgtcagcaacaatggtagagtaagaacctctgaaaattctctccttcataaaaggaataagaaagcttacaaaaattgtcagtgtccatttttttcagaactcttagaattaaccaagggcttgcaacaacctagggagcatttattcaataaaaatggctgtatgtcagtaaaaacagtgagctttatggcatgttaacttgccttattcccatgccctgctttccaacccagtgataaccttgaaaaatcacagcccacactcccagtgcagtctggcagtcacaggaagaagaaaaagagatctggagctctttcaaggtctggttccgaaaatttaccaatatctgacctgtctgaaagttgacctgaagaccacatttgcaaagctgtttgtacttaacctgacttgaagcttgatcagactaaaaagtttcctcttcaggggatgtttgttgaaaacaatttagaggcaaatgtcttaactttacagctagctgaagtgcttgcttcaaaggtggataagaactggtaaacaatagactaaacaaaagttttataaggacaaactgaggaataaggtgttcataggggctttgaaaacctctgacatattcctggcaaactagaagaccacacaaatgcccagggctgtgcacatgcttaggaaggagttgaaaagaccctaataacttacctttagtgattaagaggtgctgaacaagcaggaagtgaaggaaggaaggcagagttgctaaatgcctaactatatgtttaagacatacatcaacacacagagctccttgcaacagactggaaggcttactagttccagatatttaagttaatctctgtccagtaattagctaaccactacttcagtggtcacacacaacagagaacgcagactttacagaatttgttcagaaagtcactaaacaaataacaaattcaacaagcagcaaccacaacaaatcctgaagaagggggaaatctgattgacagagttgtcatgttattttatccagttttcaacaacaacaacaaaattacaagacatgtgaagaaataagaatttcggtccatatacaggaaaaaaaaaacaatcaacagaaactgtcccaggacatcagacttaagataaacacttaagacaaagacaaagtcacctattttaagtatttaaattttttaaaaagccaagaaaatcatgtctaaacaattaaaagaaagtctgagaataatgtctcaccaaatagagaatatcaatttatagaaagtatttaaaaatgaaccgaatgtaaaatttaaaagaactataactggagcttaaaagtataactaaataaaaaataacacagcagatttgagcaggctgaaagaatagtcagcaaacttgaagatagatcaattgagatcacctagtctgaggaatagaaagcaaaaacaattaggaatgaacacatccttagaggcctgtgtggcatcctcaagagtatcaacatatgcataatgagaatcccagaaggagagaagaaagaaaaagggaaaaaataaatatttaaagaaataagaacaaaaacttcctaaatttgatggaacttttaatgtacacatccaagaaactgaacaaactccaaacagaataaattcaaatggactcacacctaagcacagcctcatgaacttgtcaaaagacaaagaaaaaaatattgaaagtgagagaaaagttactttgaacaaagaacaaagaattctcaataaaatttacagctaatttctcatcagaaaccaaggaggccagaaggcagccagatggcacattaaaagtgctggaaggaaaaaaaaactgtcaagcaagcattctatatccagtaacatcatccctcaaaaatgacggagaaatttagacatacccagaataattgtatgttgataaattagaaaacctggatgaaatgaacaaatgtttagcaatacacaaactaccaaaactgacttgaaaagaaataaaaaatctgagagacctctaacaagtcaacagatttaattaataggcaaaacccttccgacagagaaaattctaggaccagatggctttactggtgaattctgccaaatatttaaagaagaactaacaccaatcacttataaactatccaaaaatagaagagtaggaaacactttctaactttttctgagtctagtatcactctgataccaacacagacaaagacatcataagaaaagtatagaccaatatcctttatgagaagatatgcaaaatcctcaacaaaataccagcaaataaaaatctaaaagcatataaaaatagtcatacagaaggactctgataagatagaagagtaggaatcaccagaaatatctctccacctagacaacaattgcactggcagaaaccatctgatataatgattttggacctctggagtctattgcaggctttcaatttccaggggaagctaaatgaactccaaataatattaactcaaagaaattcatacatatacctattataatcaaactgttgaaagctaaccacatcagaaactttggagaccagaagacaatgagctgatatattcaaagcaataaaagggaagactctcaaccaagaatcctataaccagcaaaatggtccttcaaaagtgaaagagaaattaagacattcccagatgaccaaagctgatggaatttgttaccacttggcctgcccttcaagagatgcttgaaaggaatcctacaggttgaaataaaaggacagtaggcagtaagttaaagctatattaaaaaaaataaaggtctcagtaaaagtaaatgtatgggcattttaaaaactagcatcattgtaatatacagtacattactgctaaaatagatttttaacatttccaccacaaaaaatgacaaattgatgaagtgatgagtatgttaattagctcgattgagtctataatgtacacatggataaaaacatcgcattctatttcataaatatacactattatttgtccttttaaaatgaataaataaataaactagtattgtacaatggtgtataacttcgatttttgttttctatgtgatttaagagaataatgcatttttaaaagaacaattgttagctcaaaagccaatattattgtaacttcggtttgtaatttcacatttttttctacataatttaagggtctagtgcatagaaaaataagcttatgttttaggatgcacaatgtgcaaagatgtatttttgtgacattaatgactgaaaggggtggagatggagctgttaatagagcagtttttatatgtcattgaagttaagctagtttaaattcatattagagtgttatcacttagaatgttaaatataatcaccatggtaaccataaaaagtagtcaaagaacatatacaaaaggaaatgtgaaagaaatttaaacactttactacaaaagctcactaaacccaaaggagaacagtaatgtaggaagtgagagacaaaaactataaggtacatagaaaacaaatagcaaaatgacaaaagtaaggccctccttacaagcaattacttaaatgaaaatgcattaagctctccaatcaaaagatatgaatgcacaaaggacaaaaataaaaatgatccaagcatatgctgtctacaagagtctaactttagatacaaaggcacaaattgattgaaaatgagacatcagaagaaaaggatggaaaaggatatttcatgcaaacagtaaccaaaagagagcaggaatggctatactaataaaaagcagaataaacttttaagcaaaaagtttacaagagactaggaaaatattatatactaataaaagattaaatataccaagaagatataataattataaatatttgcacacctaataacagaccataaaaatatgtaaagtaaaatttgacagaattgaatggggaataaaatgttctacagtaatatttggagacttttatacctcattcttaataatggatagaacaaactgatagaagataaataatagaagacttaacacaataagccaactagatctatatagagtactttacccaacagcagcagaacacataatctttacaagagcatatggaacaatttcaaggatagaccatatgttagggcatgaattaagtctcaatatatttttaaagacagaaatcatataactatcttctcaaaccacaacagaataaatgtagaaatcagtaacagaaaaaaaactgaaaaattcacaaatttgtggaaatttaaaaactactcttaaacaactaatggatcaaagaagaaatcaaaagagaaattagaaaatacttagagatgaatgataatgaaaaaagaacatactaaaacttatggggcataataaaacagtattaaagggaaaatttatcattataaatgtttacattaaaaaacaagaaagatctaaaattaataacctaattttacaacctaaggaacacaagaaaatgaacaaactaaacccaaagctagcagagagaaggaaataataaagattagagcagagataaaggaaatagtgaatagaaaaacaatgaagaaaatcaacaaaaccagaagtttgttattttaaaagatcaacaaaactgacaaaattttagctagatgtactaagtaaaaaagtgagaagactcaaattactgaaattataaatgaaagtagggacattacccataatactgtacaaataaaaaggattagaagagaatattattaacaattgtaccaaataaacttgataacctagataaaatggacactttcccagaaacacaaaagttatgaagaaatagaaaatctaaatagacctgtaactaatcaggcgattggatcagtaataaaaaatctcccaacaaagaaaagtcctggacttaatgacttcacctatgagtcctatcaaacatttaaagaactaacacaatccatcttaaactctttcaaaaaattgaagatgaaaaacacttcctaactcattgtatgaggacagcattacttttatacaaaatccaaacaaagacactggaagaaataaaaactgcagaccaatatcccttatgaacattcatgcaaaaatcctcaacaaaatgctaacaaactgagttcagcagcatattaaaagggttatacatcattatcaagtggaattttttcctggaatgcaaggatggtttaacatacaaaaatctatcaatgtaatacagcacataaagagaatgaaagaaaaaacctgcaagtctatctaaaccgatgcagaaaaaaacctttgacaaaatttaacgctctttcatgataaaaatactcaacaaatcaggaatagaaagaacttacctcaacataataaaatgcttatatgaaaaatacacaacaaacattgtgctcatggtacaagactgaaagtgcttcctttaaagtcaggaacaaggcaaagatacctattttcagcacttctcttcaccatagtattacaagtcttagtcataaaaattaggctgcaaaaaaaaagacattcaatttggaaaagaagtaaaaacatctctatttggagctgatataatctaatatgtagaaaactctaaaaattacacacacatacacacacactcacatacaaaaaatctgtaagaactaataaatgaatttagcaaagtaacaggatacaaagtgaacatacaaaagttagctgcatttctatacacaaacaatgaacaatccaaaagagaaattaagaaaataattccatttacagtagccctacctaatactcaatataaaaattaactaataatgaatttatgactgaaatgtaacatttaaaactataaaactcttaggaaaaaaacacagggcaaaagccccttgacatcaaatttggcaatgatttcttagatatgaaaacaaagacacaacaaaagaaaaatagataaattggattccataaattttttaaattatgcatcaaaagatgctattaacaaagtagaaaggcaattcacaagatagaagaaaatatttgcaaatcacatatctgataagggattaatagccacagtatatagagaacttctaaaacacaacagcaaaaaaaaaaacctgattcaaacatctgcaaaggacttaaatagatattttatcaaagaagatatataaatggcaaataatcacatgagaaagggctcaccatactaatcattagtgaaatgtaaatcaaaattacaatgagataccacctcatatccattaggatggctactataaaaaaaagcattaatgaggatgtggaaaattgagacatttgtgcactgttagagggaatgtaaaatggcacagttactcttgaaaagagtatagcagttcctcaaggaattaaaactagaattaccatatgacccaacaattctatttctggggatatactcaaaataattgaaagcagtatctctaagacatatttatacacccatgcctatagcagcattattcataaaagctaaaacatgggaacaactcaaatgtccatcaacagatgaataaaaaaatgtggtatacacatacagtagaatattattcagccttaaaaagaaaggaaattctgacacataccacatggatgaaccttgaggaaattatcataaatgaaataagccaggtacaaaaagacaaatgctatattattctacttataggaagtattcaaatttatggagatggaaatagaatagtggtttccaggggaaggtgtaaaggggatggagagttattatttaatgtgtatagagttccagtttcacaagttgaggagagtcctggagatgaatggtggtgatcattctacaacaatatgaatatagttaataccactgaactgtacacttaaaaatggttaagacagttaattttatcttacaagtattttactgacaagatttttaaaaggatcccacaccattaataagtaggatttatctcaggaatataaggttagttcaatatagaaaaaccagtcaaagcaaaacaacatattaatagaataaagggaaaaattgcatgtttatctcaacatacacagaaaaagcatttgacaaaatccaaaactctttaataataaaaacactcaacaaaataaaacaaagggaacttcctcaacctaatgaagggcatctataaaaggttatttaaggttgtagggggtggttccaagatggccatataggaacagctccagtctacagctcccagtgtgagcaacgcagaagatgaatgatttctgcatttccaactgaggtactgggttcatctcactggggactgccagacagtgggtgcagaacagtgggtgcagtgcactgagcatgagccaaagcagggcgaggtatcacctcacccaggaagtgcaaggggtcagggaattccctttcctagccaaggaaaggggtgacagactgcacctggaaaatcgggtcactcccaccctaatactgtgcttttccaatggtcttaggaaacggcacaccaggagattagatcccgtgcctggctcggaaggtcctacacccacggagccttgctcattgctagcacagcagtctgggatcaaactgcaaggtggcagtgaggctaggggaggggcacccaccattgctgaggcttgagtaggtaaacaaagcggccaggaagctcaaactgggtggagcccaccacaactcaaggaggcctgcctgcctctgtagactccacctctgggggcagggcatagccaaaaaaaaggcaggagaaacctctgcagccttaaatgtccctgtctgacagctttgaagacagtagtggttctcccagcatgcagcttgagatctgagaacggacagactgcctcctcaagtggttccctaacccctgagtagcctaactgggaggcacaccagagtaggggcagagtgacacctcacatggccgggtactcctctgagacaaaacttccagaggaacgatcaggcagcaacatttgctgttcagcaatattcactgttctgcagcctccactgctgatatccaggaaaacagggtctggagtggacctccagcaaactccaacagacctgcagctgagggtcctgactgttagaaggaaaactaacaaacagaaaggacatccacaccaaaaccccatctgtacgtcaccatcatcaaagaccaaaggtagataaaaacgcaaagatggggaaaaaaacagagcagaaaaactggaaattctaaaaatcagagcacctcccctcctccaaaggaaagcagctcctcactagcaatggaacaaagctggacggagaatgactttgatgagttgagagaagaaggcttcagatgatcaaacttctccaaactaaaagaggaagtttgaatccatggcaaagaagttaaaaaccttgaaaaaagattagacgaatggctaactagaataaccaatgcagagaagtccttaaaggacctgatggagctgaaaaccatggcacaagagctacatgacgaatgcacaagcttcagtagctgattcaatcaactagaagaaaggttatcagtgatggaagatcaagtgaatgaaatgaagtgagaagagaagtttagagaaaagagaatttaaaaaatgaacaaagcctccacgaaatatgggactatgtgaaaagaacaaatctacgtctgattggtgtacctgaaagtgacggggagaatggaaccaagttggaaaacactcttcaggatattatccaggagaacttccttaatctagcaacacaggccaacattcaaattcaggaaatacagagaacaccacaaagatactcctcgagaagagcaacaccaagacacataattgtcagattcactaaagttgaaatgaaggaaaaaaatgttaagggcagccagagagaaaggtcaggttacccacaaagggaagcccaccagactaacagcagatctcttggcagaaactctacaagccagaagagagtggggaccaatatgcaacattcttaaagaaaagaattttcaacccagaatttcatatccagccaaactaagcttcataagtgaaggagaaatgaaatcctttacagacaagcaaatgctgagagattttgtcaccaccaggtctgccctacaagagctcctgaaggaagcactaagcatggaaaggaacaaccggtaccagccactgcaaaaacataccaaattgtaaagaccatcaatgctaggaagaaactgcatcaactaatgagcaaaataaccagctaacatcataatgacaggatcaaattcacacataacaatattaaccctaaaggtaaatggactaaatgctccaattaaaagacacagactggcaaattggataaagagtcaagacccatcagtgtgctgtattcaggaaacccatcccacgttcagagacacacataggctcaaaataaagggatggaggaagatctaccaagcaaatggaaaacaaaaaaaggcaggggttgcaatccaagtatctgataaaacagactttcaaccaacaaagacaaaagagacaaagggatcaattcaacaagaagagctaactatcctaaatatatatgcacccaatacaggagcacctagattcataaagcaagtccttagagatctatgaagagtcttagactcccacacaataatgatgggagactttaacaccccactgtcaacattagacagatcaacgagacagaaagttaacaaggatatccaggaattgaactcagctctgcaccaagcagacctaatagacatctacagaactctccatcccaaatcaacagaatatacatttttcttagcactacaccatacttattccaaaattgagcacatagttggaagtaaagcactcctcagcaaatgtaaaagaagagaaattataacaaactgtctctcagaccacagtgcaaccaaactagaactcaggattaagaaactcactcaaaaccactcaactacatggaaactgaacagcctgctcctgaatgactactgggtacataatgaaatgaaggcagaaataaagatgttctttgaaaccaacgagaacaaagacacaacataccagaatctctgggacacatttaaagctgtgtgtagagggaaatttatagcactaaatgcccacaagagaaagcaggaaagatctaaaattgacaccctaatatcacaattaaaagaactagagaagcaagagcaatcacattcaaaagctagcagaaggcaagaaataactaagatcagagcagaagtgaaggagatagagacacaaaaaaaaccttcaaaaaaatcaatgaatccaggaggtggttttttgaaaagatcaacaaaattgatagaccactagcaagactaataagaaaagagagaagaatcaaatggacacaacaaaaaatgataaaggggatatcaccaccaatcccacagaaatacaaactaccatcagagaatactataaacatctctaaacaaataaacttgaaaatctagaagaaatggataaattcctcgacacatacacctttccaagactaaaccaggaagaagttgaatatctgaatagaccaataacaggctctgaaattgaggcaacaattaatagcttaccaaccaaaaaaagtccaggaccagatggattcacagctgaattctaccagaggcacaaggaggagctggtaccattccttctgaaactattccaatcaatagaaaaagagggaatcctccctaactcattttatgaggccagcatcatcctgataccaaagcctggcagagacacaataaaaaaggaaaattttagaccaatatccctgatgaacattgaagcaaaaattctcaataaaatactggcaaaccgaatccagcagcacatcaaaaagcttatccaccatgatcaagtgggcttcatccctgggatgcaaggctggttcaacatatgcaaatcaataaacgtaatccagcatataaacagaaccaatgacaaaaaccacatgattatctcaatagatgcagaaaaggcctctgacaaaattcaacaactcttcatgctaaaaactctcaataaattaggtattgatggtacgtatttcaaaataataagagctatctatgacaaacccacagccaatatcatactgaatgggcaaaaactggaagcattccctttgaaaactggcacaagacagggatgccccctctcaccactcctattcaacatagtgttggaagttctggccagagcaatcaggcaggagaaggaaataaaggatattcaattaggaaaagaggaagtcaaattgtccctgtttgcagacgacatgattgtatatctagaaaaccccattgtctctgcccaaaatctcctgaagctgataagcaacttcagcagtctcaggatacaaaatcaatgtgcaaaaataacaagtattcttatacacagataacagacaaacagagagccaaataatgagtgaactcccattcacaattgcttcaaagagaataaaatacctaggaatccaacttacaagggatgtgaaggacctcttcaaggagaactacaaaccactgctcaatgaaataaaagaggatacaaacaaatggaagaacattccaggctcatgggtaggaagaatcaatatcatgaaaatggccatactgtccaaggtaatttatagattcaatgccatccccatcaagctaccaatgactttcttcacagaattggaaaaaactactttaaagttcatatggaaccaaaaaagagaccgcattgccaagtcaatcctaagccaaaagaacaaagctggaggcatcatgctacctgacttcaaactgtactacaaggctacagtaaacaaaacagcatgatactggtaccaaaacagagatatagaccaacggaacaaagcagaggcctcagagactatgccatatatatacaactatctgatctttgacaaacctgacaaaaacaagaaatggggaaaggattccctatttaataaatggtgctgggaaaactggctagccatatgtagaaagctgaaactggatcccttccttacatcttatacaaaaattaattcaagatggattaaacacttaaatgttagacctaaaaccataaaaaccctagaagaaaacctaggcaatactattcaggacataggcatgggcaaggacatcatgtctaaaacacaaaaagcaatggcaacaaaacccaaaattgacaaatgggatctagttaaaataaagagcttcttcacagcaaaagaaactaccatcagagtgaacaggcaacctacagaatgggagaaaatttttgcagtctactcatctgacaaagggctaatatccagaatctacaaagaactcaaacaaatttacaagaaaaaacaaacaaccccatcaacaagtgggcgaaggacatgaacagactcctctcaaaagaagacatttatgcagccaaaggacacatgaaaaaatgctcatcatcactggccatcagagaaatgcaaatcaaaaccacaatgagacaccatttcccaccagttagaatggtgatcattaaaaagtcagggaacaacaggtgctggagaggatgtggagaaacaggaacacttttacactgttggtgggactgtaaactagttcaaccattgtagaagtcagtgtggtgattcctcagggatctagaactagaaataccatttgacccagccatccaattactgggtatatacccaaaggattataaatcatgctgctataaagacacatgcacacatatgtttattgtggcactattcgcaatagcaaagacttggaaccaacccaaatgtccaacaatgttagactggattaagaaaatgtggcacatatacaccatggaatactatgcagccataaaaaatgatgagttcatgtcctttgtagggacatggattaagctggaaaccatcattctcagcaaactatcacaaggacaaaaaaccaaacaccacatgttctcactcataggtgggaattgaacaatgagaacacatggacacatgaaggggaacatcacacaccggggcctgttatggggtgggaggaggggggagggatagcattaggagatatacctaatgtaaatgacaagttgatgggtgcagcacaccaacatggcacatgtatacatatgtaataaacctgcatgttgtgcacatgtaccctaaaacttaaagtataatttaaaaaaaaaagtttgcactggaagttctagccagggcaattagccaagaaaataaattttaaaacataaagattgtaaaggaagaattaaaactatatccatttataggtgacgtgtgtgtgtgtgtgtgtgtgtgtgtgtgtgtgtgtgtattgggaacaactaaggaatatgtatagggaatatatttagggaatatttatatatatatataaatcatatatatatatgttatgtatataacttgtgtgtatgtgtttgtgtgttccttaggaattccatatatatatatacacacacacacacacacacaaatataaacacacacacatatatataccacttatatataagttaaaatatatgtggaatttaacaaatatataagatagatagatagatagacagacagacagatatatatggagttcctaaataatacacacatatatacacacaaataaaactattagagttaatatatgaattcagcaagtttgcagggtgatatggtttggctttgtgtccccacccaaatctcatctcgaattgtaatccccatgtgtcatggaagggacctgatgggaggtgactggatcatggtgcggtttcccacatgctgttcttttgatagtgagtgagttctcatgagatctgatgggtttaaagtgtttggcagctccccccaccccctctctctcctacagctttgtgaagaagattcttgcttctccttcaccttacgccatgattttaagtttcttgaggacccccccaagccatgcagaactgtgagttaattaatcctcttctctttataaattacccagtctcaggtagtttttttatagcagtgtgaaaaaggactaatacatggggtatgagatcaatatacaaaaatcagttgtatttctatgtgctatcaataaacaattgataagtgaaattaagaaaacaatgcaatttatctcagcatcagaaagaaaaaaatgcttaggaacaaatttaacagaagacgtataagacttatacactgataactacaaaacattgttgaaagatttaaatatctaaaaaattgaaagacatcctgtgttcatagattatgagaccttgtattgttaagacaccaagctgatctgcaaattcaatgtaatctgtatgaaaattacaactgcttttttaagaagttgaatcctaaaatttatataaaaaggcaagggattcaaaatagtcaaacaatcttgaaaagaaaaacaaagttggagcactcacaattcccattttcaaagcttaacacaaagctagattaatcaagacagcatggtttgacatatagatcaaatgaatagaattgagagtccagaaataaacccatacatttatggtcaattgatttttaacaaggatgccaagacaatttaaagaattgtcaaagaatagtctttttaacaaatggtgtttggacaactagatatcaaaatgaaaagaatgagtttagacccctacagcatgccatataaaaatgaactcaaatttacatgtaagaagtaaaactatgaaattcttaggaggaaacatagttgcaaactttttacctttgatttggcaatggtttcttagatatgacacctaaattaaagcacaagcaagcaaagaaaaaaaaatagattagacttcatcaaaatttttttaaatggtgtgtcaaaggatgactctaccaagaatataaaaaagacaactcatcaaatgggagaaaatattaagcaaatgatatatattcccctctcccaagtgggcacaatatcagaagacaaaaatccccctgtgcccatggtgtctacatgaggaaaaaagaactagaggaggtcattcagcttccctggcacttgaatcctttctaggaagaccactgtggtcttacctcactggaggtaacagcatggctagacacccaagagtcaggtaaaaacaaagaaaggaaacagagttcatagtgaccagtgtgtagatattcgtcataactctgtgtttctcctagctttggtgccccattgaagataccagccaactgcatagcccactcacaaagctgaactggtcactttcagaagcatggtggaaagtttaacttggcctgagtccctagatgggtagactttacacccagattcaatgccaaccccaatactcccacccacgccaggagatgcctacctttccccattttagagaagcaaaggaactagatctgtttggcctgagagtccaagagtggctcagtttaaccaaaagcccatgtcacccaggcagtgagacgttcacctttgcccattttggagaagcgtagggactagacctgctcaacccaggagatcaaacagcagctcaactcaatcaaaatcttgcccctttgctttgcccaaataggtaggcaatcttcaactgtgcatttctaaagagcatagtctctgatcccacccgtcttgagcagcaccctcacctaacctcagagcccagcttgcagacttgtccagccacaaattccaaataacagaaccatccaacaaaggaatatatcctgcaaccagcctgacaagaggctattacagtacccagctaacagtttcaactaatagcaaagcccagcaactaatctctccagataggggaacccagatagaagccccaccaaacatcagagcaaagtttcccagccaactagtgaacccacaacaagctctgcctaccaggggttgtcactagctgctccttccagaattatagtctatactaaatattgaagatctagccccaccatagaacacataaggattatggaaaatcaaggaagttttgattgacaccttcagaaagtactaataaagatacaataatgaatcctaaagaaattgagatctataaaatgactggcaaagaatttagaataattatcttacagaagttcaatgaataacaaaaatgtatgggtaaaaaagttaagcaaaatttagaaaatacacaaagccagaattttcacaaataaataaaaacagtttaaaaaatagacattctagggatgaagaataaaatgcctggactgaaaatttcaatagaaaacttcaaagcaaatgaaatcaaccagaagaaagagtcattaagctcagagacaaaacatttgaaattatccagtcagaagatcaaaaagaataaagaataaaaaagaataaagaaagcctacaggaatcatggaataccatcaagagaccaaatctttatatagtaggattttcagaggagaaaaaaaaatagaaaaagggacagaaatcatatttttaaaaaacaatggccacatacctttttaatctgggcatagatcccaacattctagtacaagaaggtgtagaggtctccaatcaaatttaacccaaaaaggagttcaccaagacatataatcaatctatcaaaaatcaaagactaaaagttttgagatcagcaaaagataagaatcaggttgcttatgaaggagtgtcagcataactctttgcaaatatcttagcagaaaccctgcaggtcaggaaaaagtggaataatatattcaaaatgatgaaggaaaatacctgataaccacaaatactttacctagcaaagttgtctttcaaaaatgagggagaaataaaaacttccccaaatgaactaaagctaagggagtttataaccactaaaccttccttaacaggaattgctaaagggagttctttaagctgaaacaaatgaccactaattaataacatgcaaaagcacaaaattcaatggtattaaaaaatagaggcatattcagaatattcaagaactataattatggtgtgtaaagcaatcttattcttagtacaagggttagaagacaaaactgttaataactagtatagctgaaatgagtagacaagggatacacattacaaaatgatgtaatttctaacattggaaacaaaatgggtgggagaaataaaaatgtagagttgttttatgtaatcaaagttaagttgttatctgcttgaaataggctgctttaagtataagatgttctatgtaagccatatggtaaccacaaaacaaaaaatatttagtagaaacacaaaacaaaaattgaaagacttaacagtataccactacagaaaactatcaagccacaaagaaaaatagcaagagaggaagaaataaaatatcataaaacaaccagaaaacagttaacaaaatagtagtaagtccttatctattaataattaccttgaatgtaaatggactaagttatccaatgaaaagacggagtgactgaatggattttttaaaagacaagacacaactatacgctgcctaaaggaactcatctcacatagactgaaaatgaagggataaaaaatgattttatgcaaatggaaccaaaagagagcagggatagctacacttacatctgacaaaatagactttaagtcaaaaactgtaaaaatagacaaaaaacattatataatgataaatgagtcaattcaccaaaagggtacaaaaatgtaaacacatatgcacccaatattaggacaccaaatatataaaacaaatattaaaggatctgaaagaaaagatagagggcaatacaataatggagatttcaatatccactttcaacaatgaacagatcatccagacagaaaattaaaaagaaaacattggacttgaacagcacttttgacccatggacctaaaaggcatacacagaacattgcattcaatagcaaaagaacacacatttttctcaagccatacatggaatattctccaggatagatcacatgttagatcaaaaaaacagcccttagcatatttaagaagatgaaatcatgtgaagtactttatgaccacaataatataaaactagataacaaaaacagaaggaattttggaaaatttgcaaatacataaaaaataaacaacatgttcctgaataatcaactggtcagtgaaaaaaattaaaagagaaatttaaaaataccttgaaacaaatgaacatagatacacaacataccaaaacttatgggatacagcaaaagcagttatgaaagaaacagcaaaaaatgcctatatcaaaaaaagaagaaagattttaaataaacaacttgatattactctccaagttactagagaaaaactaatcccaaaattagaaaaaagaaggaaataataaaataataaaaatctgagcagaaataaatgacacagagacagaaaaaaatacaatcaaaaaagaaagaacttttttttgaaaaattaacaaaatcaacaaacctctagcttaactaagaaaaaaagggagaagactcaaataaataaaaccagaaatgaaagaaaagacattatatctgataccacagaaatgcaaagaatcataagaaactactatgaacaactatatgccaacaaattggataacctagaaaaaaaaagatacatttctagacacatgtaacctacaaagactgaatcatgaaggaataaaaaatctcaacagaccaataataagtaaggagattaaatcagtaataaagagtctcccatttgagaaaaagcccagggccttatgacttcatggatgaattctaccaaatattttaaaaaaaagagctaacatcaatctttttcaaatgctaccccccaaagaaatggagaagagggaatatttctcaactcttttttataaggccagcataaccctgacactaaatccagacgaggacattacaaggaaagtacaggccaatattcttgatgaacatagatgcaaaaatcatcaacaaaatactagcaaatcaaattcaacagcacattaaaatggtcactcaccatgatcaagtgggatttatcccttggttacaaagatggttcaatacatgcaaacctataaatgtaatacaccatattaacagaatgaaggacaaaaaccatatgatcatctcaatagatgcataaaaagaatttgacaaaattcagcattctttcatgattaaaaactgtcaagaaattacgtatagaggtaatgtgcctcagcacaataaaggctatatatgacaagcccacagctaacattatactcaatgttaaaaagttgaaaacatttcctctaagatctggaacaagagaattatgcccacttttactacttcaactcgactgagtattagaagttcccatcagaacaattgagcaagagaaagacgtaaaaggcattcaaataggaaaggacagagtaaaattgtcactatttgctggtgacattatcttatatatagaaaaccctaaagaccccaccaaaaaccttttagaactaataagcaaatacagtaaacttacaggatacaaattcaacattaaaaaatcaatagcattggccaggtgcagtggctcacacctgtaatcccagcactctgggaggccaaggtgggccgattgaggtcaggagatcgagacaatcctgcctaacatggtgaaacaccatctctactaaaaatacaaaaattagccaggagtggtggtgcatgcctgtagtcccagctactcaggaggctgaggcaggagaatcacttgaacccaggaagtggaggtggcagtgagccaagatcatgccactgcactctggcctgggctacagagggagactccgtctcaaaaaaaaaaaatattaatagcatttcagccaggtggggtggctcacacctgtaatcccaggactttgggaggcagattgcttgagatcaggagtttgagaccagcctgggcaacatagtgagacccccatctctactaaaaatacaaaaattagccgggtgtggtagtgtttgcctgaagtcccagctactcaggaggctgaggcacaagcatcacttgaacctgacaggtggaggttgcagtgagctgagattgcaccactgcactccagcctgggcaagagagtgaactcggtctcaaaaaaaaaaaaaaaaaaaaagaaagaaaagaaaagaaaaaaaagaaaaggaaaaaaaaagaaagaaaagaataagaaatcagtagcatttctatacactaaaaatgaactatccaaaaaaagagaaatcccatttacaataactacacacacacacacacacacacacacacacacgtaatacttagaaataatgttaactaaataggtcaaagacctttacactgagaacaaaacatttataaaacaaattaaataatatacaaataaatagaaagctattcagtgttcatagcttgaaagaattaataccataaaaatgtctattataccaaaagtgatctacaaattcatgcaatcctatcaaaattccaatgtcatttttcacagaatagaaaaaaaatcctaaaattttgtatgaaacaacagaaaaacccaaatagccaaagcaatcatcagcaaatagaacaaagctagaggcattacactacgtgattttaaattatactacaaagctatagtaactaaaacagcagggtactggcataaaaataaagacattgaccaatggaacaaaatagcccagaaataaatccatacatgtacagttaattaatttttggcaaaagtgccaagaatacaccatgggaaaaagatagtctcttcagaaaatagtgctaagaaaagtgtaagtctacatgcaaaagaattaaattggactcttttctgacaccatatatgcaaatcaactaaaaatggtctgaacacttaaatgtacactgaaaactgtaaaactgtaaaaagaaaatacaggggaaaaactgcataacattagtcttggtgacgattttttagatttggcccaaaaagcaaaaatagacaaataagattacaacaaacttaaaaatttctgcatagtgaaggaaacaattaacgatgtgaagagacagtctgcaaattgggagaaaatatttgcaatccatacactcaataaggagctaatattcaaagtgtgtaaggaattcaagcaactcagtaacaagaaaacaaataattcaatttaaaaatgagctgggtgcggtggctcacgcctgtaatcccagcactttgggagaacaaggtgggcagatcatgatgtcaagagattgagaccatcctggccaacatggtgaaacctcgtccctactaaaaatacaaaaattatctgggcatggtggcacgcgcctataaaaattagctaagcatggtggcgcgcacctatagtcccagctactcagggggctgaggcagaagaatcacttgaaccagggaggcggaggttacagtaagcccagatcacaccactgccctccagcctggcaacagagctagcgagactccgtctcaaaaaaaaaaaaaaaaaaatgagcaaggggactaaacacacatttctcaaaagatatacaaacggtcaaaaggtatttgaaaaaatattcaacttaagtaatcatcaggaaaatgcaatttaaaactacaatgagctatcatctcacaccagtcagaatggctattgtcaaaaagacaagcaataagaagtgttggtgaagatgtagagaaaagtaaacccttgtacactgttggtgggaatgtaaattagcatagtctttatggaaaactgtatgatgttcctttaaaaattactaataaagctgccatatgatccagcaatcccacttatgggtatttacccaaaagatttgaaatcagtttattgaagagacatctgcactctcattgttattgcagcactattcacaatagccaagatatggaatcatcccaagtgtccatcaatggatgaatgtgtaaagaaaatgtggtgcacttatacaatgaaatattattcatccataaaaaagaataaaattctatcatttgcagcaacattgcaggacctggagggtatatgctaagtgaaagaagccagacatggaaaaacaaatactacctgatctcacttacatgtggaatctaaaatgttaaagaagcagagaatggaatggtggttaccagggcctggggtaggagtaggggaatggaaagactttggtcataggatacaaaattccaagtagacaggaggaatacattcaggagatctattgtacagcaaggtaattatagttatataattatggagtataattatatactccataattgctaagcgaataagttgattttaaattttctcaccacaaaaaaataagtatgggaagtaatgaacatgttaattagcttgatttagtcattccataatggatacatatctctaaacatcaattgaaaaataaacacgtaaatagtaaaatagaaataagttaatccacacatgcacaccacatttcacctggcagttctacttaatctattatataacgtgcatcatctaatatcttaaacaatgtgccacatctaatatgttatacaatgtgcttctttatctcactgtgcttttcccactaaaatgtaagcttgacaaaggcaaggatttttacctttttttccctgttgtgtctctggccactcttacagttgggcactaaataaatattgaatgaataagtggatggagagagggaaggaagagaggaaggagggaggaaaagaagggagggaggacgagagaaagaaaggagaaggaagaaagataaagaaaggagggatagaggaaaggagatgagagtgttatgtgctcctgagtatgaggatgacgatacgacatctcgtgtttgggtactgagttggattttaaaatcgcatggtgcagtagcacatagcaaacattcaaagactgtgtgctgccttaatgaacaagcttccttaacttgcgtcttccacttcccttaattactgcaacctcctctttttcctccaaccagagaaggtctgtaatggaattcttgtgccttcagggggccacaggacaaaatctgcagctggaggatcacttcctatctctacttcctcctggcagaaggcagagcaagccccctgagcattccaagcccctgctccgatgtaccttgtcagggttaaaagcacagcaggttggtgtgtgcggagaccggtaaataagaaacaatggctttggtgtttggaatgtagaaaagctgctcaaatcgctcaggtgggtgctctatgaaagtaaacttccattggttccagttttatttcatcttgcctgtaagtgcgaagattgtttacagaggcatgcccaccgtcctaggcccatagtaggaccaaaatgttgatgctgaacatttttgttttctatgtttgctttaactggggagtcacaagttcaaacagccacaggaaccaatcctggggtgaagagtaggctgtgttggggactgtggtaaactagacggctcatgctgacacccagttccactgagggtggccacggatgtagggttgccagagttgtcacatctccatctctctctctctctctttctctctctctcattctctctttctctctcattctcattcttcctctatcattctctctcattctctgtctcattctctttctctcattctctctctcattctctgtctcattctctttctctcattctctctctcattctctgtctttctcattctttctttctcattctctctcagtctctgtctcattcttttctcccattctttctctctcccattctctccttctctctctcattctcattttctccttttctctctctcattctctctctctcgcattcactctttctctcagtctcagtctcattctcactctcattctccctttctctccctcattctctcttttttctcattctctctcattctctctcactgtcattctctctttatcattctttcattcactctcctctctcattctctctctcagtctctgtctcattctctctcattctctcttcctctctctcattctttctccccaagataagctgaatgtctgaattttctgtgaaatgtaatttttaaatgctagaaaatgacctgatttgctttgaaacacctatatttagattctgtattgttcatttatttatgtatacagtacagagttgtgcaagcatcaccagaatctaattttgagtacatttatatcatttcagtaagaaatagtgtgccccttagtggtcaccccttcatttttctcctgtcccccaccaagcctagacaatattttctgtctgtatagatttgcctattctggacgtttcatataaatgaaataataccaaacatggtcttttgtgactggcttctttcacttggtgtagtgtttcgggagttatctttgttttggcctatatcagaactctatttctttttgttggtggtggtaaataatattctattgtatggctacatgacattctgtctgtttattcattagccatcaaacaagcatatcacaggctggtcccagccctgggggacccatttttcaccatgcaacagcctcctggctggtgtccccatctcctgttcaatccccctgccctctgctgacacagggtgtgcatgcaaccagccagacagcccagggtagaaatattgggacaatttttctaaaccaaggctttgagcatgtcactctcctccatccccacctttatgctgaaatcaccctcctctcttggcttcagagtggagctccagccccttagtccaaaacaaaaacttttgcaagagctggccccaccaccctccacacccttccctgctcacaaaccctgtgctccaacacaccatgtcaccctctcctctcaaagcctgagcatgtccagtcctctgtccccttgctcatgctgtgccactggtgtgtaattcaccaattgtgggtcattctcctccactgagtggggaactgttctggaaggagaaggggtattctctgtcctcaggacttgggacaaagcaggtacataatgaatgtctgacggtggaatagacacaggccattcctccatctaaaatgcccttccctacattgtccatctcacatttgacagcagctctccttgctcacccacacctgatccaagcactgattatctagttcgtctctgtgctcatgcagcacctagctctgtgtgtgcgtgcatgtacgtatgtgtgtgcgagcgtttgcgtgacttcatcagatttcagtccttggggacaagcttttccccatattgttaaaaattcagtctgtgcaataatttgttgaggcctaatttgcatgcactgagatgcaaccatttaagtgtatagtttgatgtgtttcaagaaatgttcacctgtggattatactcatgtagccacagctgccatcaaaatatagaacatccccatcaccccagaaagctcttctgtgccccttccaggtcaatgccctcacgccccatccaaggcaaccactgatctctcctgacaccacagctcagcgtttgcggctgtggggcttcataggcacggactgaggcagcagacaatcttgcgtgtctgtcttcatttgcgcggcgcagcatctgtgagattcagccatgcagtcgggtctgtcgtgaattcactctttttgccccattcccagcacagtgcctgagtgtcaaattgaatagacttcaattgctgtgaggtgattaatagcaaattgtgtgttattcatgaataaagaaaaaagatgcaacgtgttctgggaggtggaaaagagaaagaaacccaccccgaccccgcctttctgttctcacctaacgaagtctggagttcagcaagaaaaggtgtgagggggtttttcaggaaacagataggccaccagggtccaaatcagaggtagagtggcacatccagcccaaatggaaacaaacgatgcaagcctatggcttaaatcagaaattaatctctactggtagtttccatgaactcttctccaggtaaacatcacatgtaaaagtaagttcctgtcattatagaataattagattataagaactaaatttatagtgtatactacgcattactgcagaattgtagaaattatgcaacccagtccttaacagaattaaatgggaatctatattttttctcagtaagtctttattgaatgaatggagtcatattctgtttgtgtttttctgtgcttttgcaatttctcaaattaaagataaataaacggtctcttcttggcctcgtggctaagatcaagtgtaaagacaagtaaatggtagttgaatgaaagaaaccaggaaaagttatttttggagtgtgtagggtgtgcctcgcctccttggacccacctcgtttctcccaagagcagacccagatacactaactcgatctgcctcccgcctcctccttctgctttaatcaactgtgggtcctgctctcttcaatgcctgcgtgtcagctaagtttgcaatcaccccgtttacagcttgaaaatgaagccctgtcttttctgcaagtaagaatcttcctgaaccatgcatccaaatgtcacatttccaaacatgttgtgagctgaggactccaagtcataaacttcaaagcaagtacttgtaatgggaattctgactgacagtcccttaattacagtctttaaatatgcacagtccctgacggagccaggctttctgaggaaaattcctgcctaactggttgaaaatgtgaacagtggggtataattccctgagctgcaaggagccacagatcagagaaaatgcaagagaaactctaaagacccttgtaggatgaattttgtcttttgcaggcggtatgaaaaccgaaagaggggagacaactgggacaaggagaaacaaatatttcctgtgcttgaagctgacacacatggtttatttgccggtgtttggagaggttagaaagcaaagatagcagaggaagaataggtttatccttgaggacagaacatgcatgctggtgagtgggaagggactaaaaacaaggtggctgggccgggcgcagtggctcatgcctataatcccatcattttgggaggccttggagggaggatcacttgaggtcaagagttagagaccagcttggtgaaaccccgtctctattaaaaataaaaaattagctgggtgtggtggctcgtgcctataatcccagctactactcaggaggctgaggcaggagaattgcttgaacctgggaggcggaggttgcagtgagcctagatggtaccactgcactccggcctgggcaaaagagcaagatttcgtctcaaacaacaaacaaacaaaaaatgacagggtggcccaaaacaaggcagtcccactgatcacggactccagtgacattaacagagaccagggggacatggttgcccctgtgtgccctgggtcacatcacagccactccttattggccctagccacaggatgtgctatgtctcaggcagtggcgtgtgtgcaggtaacttctccatcagagccccagaaggcagcatggcatcaggtttggcagtcttatgccacgttgagatcagagaccttgttttattagcacagggtgctcagccaacaagaatgtcaagctggtgtttttgctaccacagccccagtttaatgacagagagtaaccttgatatgtagtttggtgaccagttaggcaggaaatttatggcaaaacacagaaatgaccacactggagtggatttaagtcctgatgctgccaattaacagctatgtagctttgcccttgggccagagttaccacgtaaaacacaaatatccagctaaatctgaatttcagatatataacagataattttccacatataacacatactaaaacattatccattgtttatctaaaatgcaaaggtaactgagtgctctgattttaatttgctaaatctggccaacgactttctcttgctgaacctcattttcctactgtttccaagtggacagcagtgcatgtctcaagggggtttgagaccagctgagatgctgctggcccagcacagggttcctacactatgagggtgatcaactgagctctcagtgcttcttctccctcaggatctttgtctgccttttagctctttccaaatgttaaactttccataaaggccaatgttatgtgtcccccatggcagaacatttcttttctcaccatagaaatcaatttattgtatatttcaaaataactaaaagaatgaaattggagtgtccctaacacaaagaaatactcagtgcttgaggtgatggatactccagttgctctgatctaatcacaacacatcatatgcttgtatcaaaatatcatctgtaccccataaacatgtgaaactattatgcatccatgattaaatataaaagtgaataaaaaagaaagtacaagaaactcagggtcagaggtaggaaaggaaggcaggacttgaaggtgaccttgatgtctcctcaatcccaagacttatctgatgatactgctcttcccccaccccatggttccctttttggctgtcaaatagcattctgagccaggcatggtggctcacgcctgtaatcccagcactttgggaggccaaggcagatggatcacctgaggtcaggagtttgagaccggactggtcaacatggtaaaaccccatctgtactaaaagtacaaaaattagccaggcgtagtggcatgcgcctgtagtcccagctactagggaggctgaggcaggagaatcacttgaacccgggaagcggaggttgcagtaagacaagatggtgctattgtactccagcctgggtgacaaaacaagactccgtctcaaaacaaacaaataagcaaacaaacaaacaaacaaagagtgttctgtatatctctttcagagccagaagatgtggttggtgtgtctctaatcaagctccctgcttttgaaagggccagggagggaaatattgccgacgagatccactcggaagtggaaatatgcactgagctcctcccgcccactcgccttgcacactttggccagggagtcccactaaccactgtcagcaaacacagcttcagaacagctccagccatgttttacgccattctgccgcatccaacataatgtctaactacatacgtgcatcaataatcttttatgacatcataatgcattttagtgtgtggatggttatgatcttttagaggcccctatttagatctatggagcaaaataggaaagtttttaaaaaatgtaatctaattaatctaagcgcacttggatgcctattaaaattcacctgtccaggattttccatttatcataattactagggaacagccattctgagaaaggggccgcctcttcatttaatacaaaatgatgatatattatcctgatgcttttaggaatggtttagacataatggataggtctgtgtgacgaattctgtgaattaacgctgtacaattagacatgttgttctttcatgtagaacacacctccaagatggccgggagacacagatcatggagtgtggacaaaatggccccatggagccaccagcaggggaagggagaccatcccttaggtagctggcaggtgggcaacctctctctgattgcagatggcaaggccactggcccccaaacagtgccagcgtccctccatgaagcttggcatcactcagcatggcctagggagatgcgtcttttgagctatcaattccccaggattggtacccccgatccagaattgagacagaagaatagggtctggagacaacaagcctaaagccaacctgagggtggcttcttggaattggaccaaaaggaaaaccccacctctccatgcccaagtgacaagaggtcagagaccccaccctctacaaaacaccgtctctcctacatcacaaacaggaaatatctgattgattgatcatgggccaatccttcatttgcatagagtgtaaccaactggaggcctctaaagagtatctaggggtgttaccaaattcttctagcttaataaaaaccctaaagaacattccaatcagggcttttgagccgcttgctcgagtccactcccactctgcagagggtagttttgctttaatcaatctgtgcttttgttgtttcattcttttattgctgtatttgtgcattttgctcaatgaaaaaactcactgtcaagacttttcagccagtaacagaaggaggtgcttcctttcatgagtataagcagcaggcacttgccctggggcctccttcccttattgggcctagggagcagctttcctattcaaccacacccaagggcagcattgctcatctgggagtccacttcccctcaacctgcaaaccctgcaattgggaggcagaaccctgatgctaaactgagcaaacctgccaggatatcaccgggaagggagttgccagggacctgggggtccccagagatgagaggccagaccacatggatgcactcagtctctttccagacccctgccaagcaccacagagtgccgagcctccccttgtcccgcctgcagacaggaagggccggcatgtccagtggaactggcccagagctgcaagccttggatctgcctgggccctctgcaaggtggaggcatttctcgggtaaagcagtcctttactgcctgtatggggccaactgttctcccctgcatggcacagggctccattctcggtaaccacagccctgaagcgtttaggaaatgcccccaacacttcaccccccactgaatttgttgtgatggggcttccatgtggcctgggaacggcctctgtgtggcctctgggctcccccagggcgcacagaaatcagagcatcccagaaacagaccttgggtcagccagaggggtggacccagaaatcccacaggtaccaacacctgcatccccctgtagctgctgaagtgtgagggggacagaaaaacccaagtggctagagctcctggtccgtgtgctggttggggaagacccaggagaaagaaggaagtgaccagattgtaggtaacaatgtggcctggcctacctgcagctgggctattcttcaacattggtgtctgagtcagggacgggctgtctctccatccagcctccttcctggccccaggcctttcactctctccatcatcctgataaaactcccatgacacaccctctctatgcagtggctgtcaagtgtcagggctgtcaggctgtgatgagaaacacaaactctctgccttcgagaagtgtgaaaggcggcttcattcaacccaacatccagccccacaggtgttctatgtctgctaggcacagttttttctttcttttcaattgaaacacaggtatggcttgctctccaggtttatcccagcccccatgctcccctgcaataaactcctggcccacaggacttggtatttgttatttgactggaccctccaggcttttgagtggggaatctctgatcctaaattgcagacacagacccagtgccaaagagcacacagtcctgggggttggggtggtggggaggccaaggcacatacaaccaactccagcaccagacagaccaaatagcccccactctaggggcacaagccatgtgccatgaggaagcaaagggagggccagtggaatccactcgaatgtgcaggagggcttcctggagaaggagacgtcagaaacaagccctgaggaatgacttagtatctgagcactggcgatcagggcacactgcgtaatccaagcatggtgtgttcagcattaatgagggtccttggcaggactcagtgtacaatgagttcacaagaccagtgacttcagctgggctccccagagaaagagactgatacaaggattcctagcaagatgtgtgttaggagatgatcccagggcccacagaggacagagtggagggtgagatagggaggagcagaaagcccacagagggtgcattagtgagcagttactactgtgggcagccagagcacaatcttgctggggaccacacctcacaatggctgcacgccaaggggcagaggagctgggtcgtttgtccaccgactcttgccagcattaattgagggctgctcctggatgtgttgattccaggacagttccagccagccacgcatgcaggtagcaaagcaggttcctgcagccagagaaaaggcttcagcagagtcttggcacttatggcaggaaccacatcgtgtgtgcatggtgcaggccaaaaaggatctaggaagggcatgcgatagcatcatctgccacaggggagaatgcacgggcagatgggcaggaccgtcagagaagctctttttttcctttttttcttctttttctttttctttttttttttttttttttttgagacagagtctcgatctttcacccaggctggagtgcagtggcactatcttggctcactgcaacctccgcctcccaggttcaagcgattctcctgtctcagcctcccgagtagctgggatttacagacatgcatcaccaagcccaattaaatgttttatttttagtagagacagggtttcaccatgttggccaggctggtctcgaactcctatcctcaagtgatctgaccgcctcagcctcccaaagtgctgggattacagacgtgagccaccgcgcctggcccagacaagcccttctaagtgaagtgcaggcaggacttagctcactaggtgcagtgggaggagaggagcatgttgcttgtgcctggtgtgaagcacccccatctagggccatagggactgctaagcaaccccgaaagtttccataggcaaatctctcaaagtttcaatacatacaggatggcccctgtgacaagttgacccacggcatctgggtggtcctaggtgggaagtgtgtatggaggtggagggagtgtgtctggtcttccgatagcatcacttgccttatgtttgttcctgtctggcctgtcctaatcctgcggtcctagagttagaaggggagatgtctggggaagcaaagtgtggatgtggaaagtgtttcaaggtaaacataagcagataagaagcatggcgtctactggcctcgagctacagacagaaggaagacgcaaagcttagggggcacctgtgacagtgatccccacacacaccccaccagggtgaagcatttggtgaaggtccaggtcagattcatcctagaagtcatcagaagttgctaaaacacctatggagcctagcacatagtatgtatttaatatatatttatataacatttcatttttaaaatgcttaacattcaatcaaaccagctctttggccttgaagatcaaataagatttgaccaaattcaaccctttaatttgttttctgagctctatttcccaaaaacaatgttttagcaaaggacagatatgaagttgagaagaatgatttcataaacttaggaatcaaggttctttatacacaagacaatagaggctcatcactggtcagttagttagaccccacatcagcatctttgggagttgactagtcctggatccctaacacaaaatccaaacattcctgcagttattgacaggcatagatagcctgagtcaagacaatgcatcacattaattatttttattttatttttttttaaagacaggatcttgctgtgccacccaggctaaagtgcagtggtgtgatcatagctcactgtagtgttgacctgctaggcttaagccatcctcatcctcccaccttagcctcctgagtagctgggactacaggtgtgtgccaccactcctgggtaatttttaatttttttctagagacacggtcttaccatgttgcctaggctggttgcaaactcctgggctcaagggatcctcccaccttggcctcccacggtgctggaattgcaggtgtgagcaaccacacccagccacgtctcatttatattcaaataattactgacaattgatttttaagtaattattcttcccacccgttagcatggagcttggacccaacagcaaatatctgccacctaaaattgagatacagctcaaccctccaaatcctttgcgtaccctcaccaaggagcccctccatccctgcgtacaccactctttcaaagcccagggcctggaagggcctggctttcaccctgagctgcttccttacagaacacagacctgggttaccaacagagcctccaccatctccatcctacctccgacctcagagagatgccagtaagatgaatgcaaactttgccaagggaaggtcttgagaaagtcaaaagccatcattattaattccccgctgtttggctgggatggaagccactggtgcaccgatggaagaggcttgactccaaataaataaacacacgtcctttgggcagatgtcgggccagctccggctgttaactgatggccccgcactgtggcagctagcgcagtgtgggcaggcgaagtgacactggcagcgcggagtcttccgcctcatcgcaacaagcttggccacatttccaaatccatctctttgaaccgacacagacagcttaatgaagcaatatttatggaactgataccactggggagatggctgctccttctctccgtctcctatttttaatatttgatctggcaaacgtattattaaaggaatatttcatctgattactcttctgtttgactgcgcgtcttattcatgcatgctgggtgccaggggaaattataccgaccagtttgggagttctattatgtcattcttccaaacagccctttgctccgagtataattaccattcatgtgcaaggctgtgggcgctctggctgacctggaccacctccttttaatcacaatggcctcctccttcccctccagtcccactcgaggccctttcaggactcttttcctggggaccaagaactttctttcttgctggggacggtgactccatgcctgtaatcccagcactttgggaagctgaggtgagcagaacacgaggtcaggagttcaagaccagcttggacaacatagtgaaaccctgtctctactaaaaatacaaaaatcagccaggtgtggtggcagcgcatgcctgtaatcccagttactggggagcctgagggaggagaatcaattgaatctagcagatcaaggttgtagtgagctgagttcctgccactgcactccagcctgggtgacaaagcaagactctgtctcaaaaataaataaaaaatttaaaaaatgaactttctttctgagagtggtctctctggatatctgaaaagttgccttgatgttgttaggggtctctaaaatcactgacttgcttatgaagctgcagtttcctcataaggcagaaacagaaaagagatgggtgcaccctggcgtggcctgtccttggctatgagctcttcgtccagcatcagcatggtgttcaatttcccagaggccaccggtctcctgactctctgcctttccttttgctagcagctagctccaccttgacggtcttgaattgcctgataaatctaccctctttctgattgggcaactggctgtatttccaacttggccttaaaggtggggccagagggacattttgagcccctaaacaaggggagagcattcaagtgggtgtggcagaatctggccccaccatcctggcagagacccagcaggaggctttgtgcacaaaacagatggggcatgaccagtgtgcaggctcagctcccactgccctgctgacaaatgaggccagctcttcacctctcacgaatttccttgatttttgtttccaattgtttgctatttactttttctgtaagggccagatagtaaatgctttagtctctgcaggcagtactgtcactgccacaactacttaactccaccgtcataccaccaaataaaccatagatgctatgtaaatgaataagcgtggctatgctctaataaaacctatgtacaaacacaggcagtgggccagatttgacccatgggccatagtttccaaagtcctgctttagacttttctgtgaattaggcgtgcattttttacatcctcaaataccttagcctcataaaactaaagtcttcatttgtgagtttatgtatgtgtgtataaatgtgtgtgtgtatgtgtgtgtatatatatattcccctaatacattcaaaatatttaactaaaagaaaatgttttaagttatttcatattccacctgaatccctccagaaaatgccagatcagatgactgtttcttgagtgtgaaaatgcccaggggccctaagcaaatcattcctttcaggttttatcaaacagaaaagtgaggcctcaagaagcaaaccacatggtccctcagcacagggtcttggcagctccaaccctgactctgcagggttcctttctcctgactccaggggtcctagcccaaccttgcaggctatggcagccttgtcaactcacgcttgctgcacggatatccacccaaaggcagaccctggctgccatgatggaacccacgttttcagaggggctgtgtgcaataaacaaatgagcaaataaaagacatgtgattttagttagtgatcaatgcaatggaggaaaagtgaaaagtaggcaggataagggaataaagaatcctgggctgttttagatgatgtggtcagagagggcatccctgcaatgactccaagtcgatatagggtggatgagaaaaactgagccacacagaacgcaggcaggtgcaatctggactgaggtggaactaggcctgccacacccaggacacaggggcagccaagagggcagcaggtccatgagtgggaaggaagatggctgcagcagaagttggagatgtctcagcgccttgcaggtcccacaggtgaggttatgaggtcaggccttcatgccagcttctcaccaagactctggccactcccctggttgctgtcagagcacgcccccttggccctaaaactgtggaatcacagctcatattcttgttcttcttacccatttcttagctgttgctttgcaattcttagaataaaagtaaagttgcaggaaatttcagagcataaacataagggtacatttggatagttgcagaaattccccagccaaccagcagcagacagggccccacttaatgaaaccttcagcgagggtcaggtccacataccctttggcagacagtccaacctcacctggagttgctgccaggggtgtgatttccacaggctttcagcaccgctgatattcatgatttctcaacagctgccattatacaacatttagatgcaaaatggacaatacatcaaagcagatgttcttggaaatcctattaactccaaagggtttgggaaggcttggaggctggctccttcggcacatttgcaagcgagctgtgtttcagttcccttggtgtgggtggatgcagctttcctgcattcccaatcattcactcagctccagagccagagcaccaaaggctgcagaaatgaacacctacacctcacatcctaaaagcactacaaggacttctgtggagctgaggtcgcctgcaaacactttcatttatttactccagaatgaccagtgtgcacgttctcaatggcacctgacaattaaccatgaagcagtgcacctagagccagactttctggagaattccatggaaagcccattgtggggaggaaaaatgtgacagcaagaggggagggcttgcatctttctaggcatgtgggattgaacatcccaaagacttcttctgctctgatttgtttactgtctataaattgcagtgttggtgtgagtagggccatctgaggatcaagcatgatgatggaggccctgccccactggctacagagagtgtccaggccaggatgaatgtggtcatcatggttcctacatggttcctatcacggcagctccgtgcaacacaaaccctgactctccctccttgcctgcttttctccttggctggttccttctcaccctgcaagtcgcctcctcggagagaccttcccaggacatccatcagtacctgccctccccagccacgtctctctctgtcccgtcacctagttttattgtcttaataacagcactttccactaatggctacttgtgtggtttgttgtttcccactggtgtgggactccagggagggagctggcccctggtacttagagctgcagagaaagccactcctattattcccagccatgtgtggagcccctgcagctgcagtttgaggactgtggggttgctgcatgggaagtatagtcagcaagccgaaccctgcaccgagcacgcttcactgtttgctaaactctgacgctgagctcagagccggcaaggtccctcagcttccaacctggctgctgcagtagttttgagggtccttggcaggtcacccaaggaagcagaggcatttcagaatggaggagacaggaagaggcacatctcagcaaaaactaactttccctgtgcacagactcacccctcacccaggtccgcatggaattgagacaggccgacaggctggtttcctgttttaatgtggtttagagaaaaaaacaaaagccccttactcatgctatagtttacctaatttccagccaaccagcaacaaagacccaagaagcagtgagccacgagctcctgctgtagggggttagggacttcctccgcctacacgtgcggttggacttaaactcaccttatagtgaccttttcctccttttcatactaaaagtcacacccgtattacatgcaatgtatgaagaaggatgtagaaccagtacacaagtactagagaaacctcctatccatgccctgacaaaacccttcccgaaagaaccagcccacatgctaccctccagagcagcccgtccttgcccttttgcagtgctggcttcccttgtgcaaaagctaaatgaagctttctctttccttaagtgcaatgtccggcaatccatcttgattcctatcctgggagattgcaagaacccagggcgctgataacaatcccttcactcatggcttcgttttcttcattggtcagtggaagctgagtcaaactgcactgacaaacatccccaatatctccagggtttagcacagtgaagggcatccccgttttactgaatgtcccacatgggtcagccaagaggactctggtcctcgtcaccctcaggggctcaggctggggaagctctgtctccacctgtgattccatgatgacgaagtcagaagggagcaaagcaggcactggctgtgaggtgtcacccagaggtgacacacatcacttcctccatggctgatcccccaggaccccttcgactcattccacatggccctacccagacacccacccagaggtgctaggagtgcatcccacccagtgcccagggagcaggaatccgggcacatttggtaacagcacaaatgaccaccacccctcctgtgtcactgtctgtgctggggaaattggaaaggaactagtcttattaagagcatatgctgggccgagcgtcatggctcactcctgtaatcccagcactttgggagaccaaggtagatggatcacctgaggtcaggagttcaagaccagcctggccaacatggtgaaaccatctgtactaaaaatacaaaacttagccagatgtggtggcaggtgcctttaatcccagctactcgggaggctgaggcaaggtaattgcttgaacccgggaggtggaggttgcagtgagccgagatcacgccgctgcactccaccctgggtgactgagtgagactctgtctcaaaacaaagagcatgtgctatgccagtgttccctgtgctgcacacatttgtatcattattattatctcatgtgccaggagaggaaatctgtctggagaggaagggcctcagccaggaccacgagtgcgcaagcagaacagacagaacccaacactggggactgggccccagggcctttgcttttataaattttattttattttttcagttggggtcttattctgtcacacaggttggagcacagtgatgcaatcaaactcacggcagcctccaactcctggactcaagcaatcctttctcctcagcctcctgagtagccgggaccggaggcaaatgccaccacgcctggctcatgttttaattttttgtagaggcaggggttcttgctgtgttgcccaagctggtatcgaactcctggcctcaagcgatcattccacctcagcctctcaaattgctgggattacagcatgagccactgtgcccagctggtctttgctctgggccgcaggacactgtcctctgggcgctgcaaggccgaggcactatggctctcgtcctccctctgtctccagctgtgcgggactctgggtttgtggctgaacctcactgagctttatttctacatttgtgaggctggggacttaattcgtgctctgctcttgacttcaggattaagcatgggtgttgtgagcatccataaggcccaccgagctaggaggtctccagggaaactgctttcctcaccagatgcctgaagggtgccccattctgcaggggagagaaggaggctgggaccagcctgcctggggaccccagtggagatccgagcagaactgggtcctatcaagagaggagcaaggatgccagtacttcagaaggctacagtggcggagacacctttgaaagcattttattctgccaagtcaacaaccatttataatcactgtcatttcacaatggaaagggcaatgtaaggccaaaggggtggaaaaggtcagaacttgggaaaaactctaattgaataagtatagctatgcaaaacataacttgagtctgttttcctcatttcactgcaagtcagggcaaacatcagcacagacaagcacctgccagtgagaaccaaaaagcagtcttaccattgacttttagagttctttcgaccacaggccaggagctcctggccagcaatgagggcaccagtgcccggccacgagcaacagtgatcccacaacagtgggaagaatcaggatttgcacactccagttttcacgtgaaatcacttagcacttaccctccctgccctcaccacatcactgctgcaccctccctgctcagttttcttcctcccctcccctcacgctccttccctgcccctgtgagagcccggcccttgccctctgtgacctggggctccccacctcctggaatctttgggctgggaacacctacagcctcctccaggaacagtaattggacttttctttgagactgtccccaagctccttctccttgtttatctgctctggattaaaaggccatgaagaattgattttgcaaaggcttaataatcaggcacagtggacatgtatgtaattgaatgacagttccggattcatctttcacaacaactgtggtctcagagctgctgcgccaatgacaaagtggagacaaatgagcccttttagcatgatgctaattactgccaagtccagcctcagggttttctctctggctgggcttgggctggtccagcaggggaaggattcataaccctatagtcagaaaaaggatccgcccacctcggcctcccaaagtgctgggccagctacccaggaggctgaagcaggagaatcgcttgaacctgggaggtggaggttgcagtgagcccagattgcaccactgcattccagcctgggtgacagagtgagactttgtctccaaaaaaaaaaaggagaccgggcacagtggttcacacctgtaatcccaacattttgggaggccaaggcaggtggatcacctgaggtcaggagttcgagatcagcctgaacaacatggcgaagccccatccctactaaaaaataaaagatacaaaaaccagtcgggcgtgttggtgggcgcctgtaatcccagctactcatgaggctgaggcaggagaattgcttgaaccttgaaggcagaggttacagtgagctgagatcacgccactgcactccagcctgggtgacagagtgacagagtgagacaccatcaaaaaaaaaaaaaaaaaggagccaggaggtctcagagcttgttactgggaattgggatgggaggcagggctggcctctttatgattctgctgagtttccattaaatcaaagcaggtactgcagatcccccaattagtcagagggcaaatgatggaagcccaactcaaactgctcagacagtcatcggaagatattgccttatgcaaatacaaagaggcggatccaagcttcaggcaagctagatccaggtgcttaaagatgccattgggcatccacctctctccacttacagcctgctcttagctgacttcactctcaggaaggcttgccccaggcttacatcctcaagccaagcgaccccagtacccaaacagctcccactttccaccactagctccagaaaacgtgggcttggcttggattgggtgcccagcctggtgtatttaacacttactaagttccagacaccgtgccaggttctggagacaccaatataagacctgccacctttactcaaggagctcacagctttgccggaaaaactgggcagtgaacagacaacgtcatgagtaacctgtgtacaatgccgttccctgtgagaggccgagggctttattacagggcacagcttcacaacaaaattaaatttttcttttaactgtgccatcctccaagcctctggcccaaatatccttcacccagcagagtggtgaagagctcagagccccgcagtctgacatctgcatctgaattctggctctgccatttaggagttctgggaactcagaaagcgaattcatttctctgtgcctctctacagtgaggctgataagaatgtctacctaataaggctgttctgaggattcattgacaggatgcacacgaggcattgaattcactgccaacacacaacgagcgcggaacaagtggtctttgctattatttctattccccgctggctgctggactagtgatgggggttttgatgcaggacaggcgagccccaaagtggggcttcacccaggaaaaaattcaacagtgagccagtggtagggtagaagaaaacagctttatagaagcagcagtgttacagctcttggaatgatacagcccagtgatttcccctgcagagcagggctacccacaggcagtatgctgagagcagcagctcaggccagttccgcagtcagatttatacccacttttaattacatgcagattaaggggcggtttatgcagaatttctagggtagaggtaataacttttgggtcattgccatagaaagtggtggtaacgcctgggtgttgccatggcaatggtaaactgacatggcactctggtgggcgggtctgatgggaagctgcttccgccctgtccctgttttagctagtccccaattcggtctggtgtttgagccctgactgcggggtcaagtcccacctctgacctcagtttgaagccccgctctgtggggggaaggctctggagtgttttcacccagcacagacaaaggcccactttggaggcaggattccaccagacagatatctgagacagaagttgccccccaagacaaaagggactctgatgttactcagggatggaatttagaagtctcatgctggggaggcatgagttcccagggtgaacacaggaactggaggtgaggggtggtgctgaaatgggcctcgaagccagcttccagcaccagcatgtgaagtcctgaaccaagggagagagggggtggcaggaggtggatgggacatgtttggggtgggggtggcccttgggagaaagagttcatgggatgaggctcagcctcttgaagggctgggggtgccaaggccacccacataccgccaggcgcagccccttcacggcacatcacccagcaaggactccaatccctgggagggggaaatggaccaggagcagtagcaggcacctccagggatgcccaatgtgcatacccgctgaggacaccgctcgcagttagagcatggaatcagagctttgagggaggctggcagagctccagttttgcgtgggttatccaccctcctaaaataatattttcaacatatctgttttctgccaacagaacggaatccaactttcttagcctggtgtgcgaggccctccctgtctctggctgcagcctacaaacagaacgcaaggcagcttcctcggccaccccggcaatggctctcacacatgtcactgatggggaggaggaaaaagcccccagacccccagacttcacttcctccaagatcagcagaggttttctttctttctttctttctttctttctttctttctttctttctttctttctttctttctttcttttttttagatgagatcttgctctgtggtccaagctggagtgcagtggtgtaatcatagctcactgtggccttgacctcccaggctcaagtgatcctcccatctcagccccttgagtagctgggattacaggcatgtgccaccatgcctggcttttttttttttttttttttttttgagatggggatctccctatgttgtctaggctggtctcaaactcctgggctcaagtgatcctcccacctaggacttccaaaaaattcaagtctattttaatgttctttaaatagacttgagggaaaaaccaacccctgggaaaaccaggggctgaaagccctgtcctcagcgggagagcctcagcgttcttacagaccaggtccctaaacatgtggcttcaagggtgtctccctttcctctccagcagtgacctcctcaatgtgcctgttcagtattccataaacggagagcatgggatgcaaaagctgccttggttcagctggggaaaaaatgcctttgagagttttatcaactactagagacagcccctttataaggagtatgcggaacagccaccccattgtctgagaacagtgcccatgcagagatgagaccagggaatcccggggtacaggcatctccactgggcacagctacctggcccactcaaggttgtgggacctgggggaccagggaaactacccatcatctgggctgggctgagccaatcgcatcctcccacttgagaacttgaggctggaatcaatccctagtcagtctttcttgtgcttgagctgggagggacgaaaggctgagacagtcatttccaccttgaagaaggagaagagaaggtcacacagcagtgagagaagagagacaacaaagaagggaagatagagacagcggctgctttgccaagtcccacctggggaggttggctttgcgtccagctcatggggtcctcgaactgcccctatgtccttttcccaattaaaccggcctgggcagtttccgtcctccacccccagttatcccaaagacgaatcccagccacttccacagccctcagcagatccctgggaatactcaacaagacaggaactgagcttctaccccttaagcaattctgcaatcttttcttcattggctgcctcctcaaagaccccaagtttggtgccacttgggctggacacagtgcaaggcccagggaaccaaactcagccctctgccagcacagaatgtgagacgctcaagaaaatgttcacgccgtgggtgctgctggctcctcgatgagcgctggactgagctattaccatatttcactgccatttacagagcacagctgtgtgtgctttagtttaataaacagccatggtttgtttcctgggccaatatttcttttgtatttactgggcttggtttttgtatcttggtttaaaagattggctcatgggtctgccttgtgtccatcaccttatttctactgacttctgcactcccagccgccccttcttcatgagctttcagcttgcatccccttactggaaggagaagccattctgacaccctagacccactgtggttttctcctctgcctccacctggtttctgtatctgccaggagtcgcttctgctgggcaccccattggaaagatagcattgcagagtgaaaaactccaggcacccccgtgccctgtgactcactataggaccatcacctctagctcaccatgtgatcctgagcatgtcacttcctcccctgggccctggtttcgtggtgcgctggaggaaggcactggcccagagctcctccggcctcccgcaggtcggaccagccatgtggctgtctccctgcactcccgcagctcatcagggctgggctcagctaggggaggtgcctttcctgcaactcacccgcagctcagctacagatgcacccttgtcagtgcctggttcgggatacagccaagcctctcaggccaggcgcagcctttccagatgcatggcccggctggagtcctcaactttgtatagtgtccacacatgccgccgagggtctcccgagtatctctgtcactttcctgcattggtgggtccctgtgagctgtccttcacctcccaaggcttccactgggccctaggacccctgtgttccagactggagttggggagcaagaaggtgtaaagattgggatagataggcacaaatgctaaaagctatttatttttgtccactatgtggtaatttttaaatatcctcataaatattttggccctcctccctttgcaagatgagctaaccccctccccatgtgtgggccatgcataatgatccttattaggagaatgtgacgggagtgatgctgtatggctcatgctgtatgtatgggaataatgctgctcatgaaaagcatagcttctgctgggagccctctctctgggattgcttgctctgagagaagccagctgctgggtcagggggacactcaagcagctcggagactagagccgtgaatggaggaacttccttcccaccagcacccaacaccaactcgccatgtaggtaagcctcaggtggctttccccctgagcctcaagtgtatcttccaacgctaggtgaggctttatgtgactgcaacctcacaagaaaccctgggccagaactccatgccaagccaccaaatccttgacccagaaactcttgactcagaaaggctgataatcagtgttcattgttcaacccaggtgcccatcagcaatggactggataaggaaaatgtggcacatatacaccacggaatactacacagccatccaaaagaatgaaatcatgtcctttgcagcaacatggatgcagctggagaccactgtcttaagagaactaatgaaggatcagaaaaccaaataccacacgttctcacctataagtgggagctaaatcgtgagtacacatggacataaagataggaaccatagacactggggactactgggggggaaagaaggagggagggcatgggctgaaaaacacctattgggtaccatactcactacctgggtgacgagatcatttgtcagaaagagaaaaaaaaagtaaaacaaaaaagagtaagaaataaatattgattgttgttttaagtcattaactttgggtgatgcattatacagcaatggatgactaaaacaacccgagtccccccagaagctaagtctgtgtcacgcatttctctctgtgcatggagaagcaggagagtccttctatgatcgctgagttgcctttagtaagatactgagcaggtgaggcttcactgcattgctgtgcagcaacctcacattttgcccagctctcatgcacgtggctcaggtgcctccatgcatctacagcctttagctgaacgaggtctcgtagggcctgagtagccaccacagtccagggctggtccagaaaccactcactttaggagaagcatggctgagcccagagaagctcctgtcaccaagtccacaaatgccaacactgaggcagcctcacgcatcatgttgcgaaaaatatttccctgtagcacaggaccacaacctcagctcaaacctgtgctctgagaaccatggtaggagcatgacatgggcagtcagagatctttgctaatgcagcctgctggcttctccaaggcatgtctggaccaaggtgtatgaggttgcatcattccctcctgacacaggctctagatgccaagagcttgaggagagtgagagggatcacgtttgtgctaagccaggcctccagccaagagtgctggaggcagcccagcctctctcgtcctcatgggcaatgacagatccatcatctaagctctaagcatggagcccagtgctgccagggatgcctgccagctctcaatgtgcccttatgggcctcgcattataaagggacagacattcaagtcaatccagtttagcaaacactatctgaccatctactgcctgtggggcacaggagtagtggctagaggaaagaggaagccagtgcagctcctgcctccaaaagctgcactctctagcaagtgaagaaatacaggatcactcaggcaaaatgtggacaaggctggagctaaagtattagctgtctctgcctcttctgagaccctaagaattgtgaacattaagagaagttctgtcaaagggtctatctttggcatgggctctgaagaggtcataaagaaaggcttcggccaggtgcagtggctcatgtgtataatcccagcactttgggaggctgaggaggaaggattgcttgaggttagtaatggacccactaatgtaggaaaatttgagaccagcctggacaacatagtaagaaccccatctctacaaaaaaaattacaaattagccaggcatggtggtgcatgcctgtagtcccagctactcaggaggctgaagcaggagaattacttgagcccaagggtttgaggctgcagtgagctaggagctaggagcaccactgtactccagtctgagcaatagagcaagaccctgtttcccaaggaaagagagagatcaagagaaagagagaagaaaaagaaaaaaagaaagaaagaaagagagagagagggagagagggagggagggagggaggaaggaaggcaggaagaaaggcaggaaggaaggaaggagagagagagaaagagaaagagaggaaggaaggaaggaaggaaggaaggaaggaaggaaggaaggaaggagagagacagaaagaaagagaaagagaggaaagaaggaaggcaggaaggaaaagagagagaaagaaagaatgagaaagaaaagaaagaaagaaaggaaagaaagaaagaaaaagaaaagaagaagaaaggaaggaaggagaaagagagagaaagaaagagataaagaaaggaaagaaggaaagaaggaaggaaggaagaaaggaagaaagaaagagaaagaaaggaaggaaggaggaaaggaagaaagaaagagaaaaagaaagagggaaagagagagagaaaggaaggaaggaaaagaaagaaagagaaggagagagaaaggaaggaagaaagaaaagaaagaaaggaagaaagagggagggagggagggaggaaggaaggagagaaagaaagagataaaggaagggaggaaggaaggaaagaagaaaggaaggaaggaaggaagaaagagagagaaagaaagaaagaaagagagagagaggcttttagtgaggggcaacaacacaacagaagacatcatcatggaggtgacatcatggaggtgcaggacagcagggtgtgctcagggactgtggccatgactctatcatgccagtaggttattcaggtcagctagcgccatgataatgttgcataacaaacaactcctaacagtagcagcctacaacaatgagaattcgtttctttgctcacagttgtctggttgctgagatgtctgtatgctagactgctggtcaaagtcaggtctgctggcatgtctttcattccaggacttgggctggaggagcagtacttacctggagcacattcttctccaagtgcaaggcaagagggcaagagtccaggttcaatcatattgaaagcctctggctggatgtgacatacatatctgcacacattccattcgttggagcaagtcacgtggcctgctcagtaggaggagcaagtcagtagggcagagaagtactctctgcttacagtgagcctggaaaagtgtggggagcgaaggaaaaacagtgaacaaataatacaatgcaatgcaatacaatacaatacaatagatggtgaccaagaagtcataatatgagactggaaacacacactaggcctcctgtgggagagactagattgttgttcaccaaacaatttctcttttcctctgcacacaaaactaggtatttcccagtctccttcgccattagtgtctgaattctggacaatggggtatagcagaagtgatggactctgcttgcaggcccagcctgctacaacttcctacttcaccctccactctctccttgtctgctgggtagatatacaaacccagcagaggaacctgtggcccaaggtgatggcagagccacaatgtggaaggaggctgggtccctgagtcaccgcctggacagcagccacccggaagatctacttgacccacattagtctgtttcagcagttgtaagtaaacttgtattgtgctaagctacagggatttgggggttatttgttacagcagttaatctaccttactattcccccgtgtcacagaggccctcggtgtggggctaagtgaaacacactgagaaacgaagtcaggcaggcttggattgaaatatcagcactagcactgtttagcaggatgaccttgaacaaattgctttacctctctaggtcttagtttttcatttttagatgggatttatagtccctgccttaaaaatatatatatatatatataagtgacaaactctgttactcgaagaggtggggtatcttgctgagacttggcagagctgcactattgatccaggagcttacaagaggcttttgagagatggcagcatgatgtatcaaggcttcagtcttcctggggctcactctgctgtgggcagggaagtgggtggggagcaggatggccctccatggagtgggcctggggagacccctgctgcaaggtaggcaggaccttctgcttcaccaggggtttctccacgcatctgctagaagcttgcagaaaagggggctgttgattctcacctcttagcctgccacctgcctctgactccccagaccccccaccagtgaaacctgcaaaggccctctgaaccccagatgctgaggctcaagcttaaccaggtagacagatgatctcccagagtaagatgagcagagggagctgggagggctttggaggccccaggacaaacaccaatgcaaaggcctgtggcagccttgagtctgggtggccaggcgttacttacattttattattttagtgggattttgctgctgctattgttgttgtttgtagagataggggtcttgctatgttgcccgggctggtcccaaactcctggcctcaagtgatcctcctgcctcagcctcccaaagtgctggacttaacaggcgtgagctaccatacccggtctagttttgttctgttcggttttttttcctgaaagacacagaggaagagagcatagacttgggagattttaaactcccagctctgcctcttgcttgctgtgggacttcaagcaagctgcttacatctctgttcctcagtttcctcaactgtaaaattaagccaattgcagttctctccgtgtggcttttttttttttttttttttttttggtgaaaatgacatgagttaatatttgtaaagtatatagagctatgcctgggatgcatgaagggctgtgccagtgtttgttcaatgaataaagcagacaagagagtgaggcaaagggagagacaggcaatgagagggggaggtggagggactcaagacagagagaaagagacagcagtcagatggcacagatagggaggccaccaggtgcacagaccgacaggaacagacaagcaggaaggagggggcaaaagcaaaagcctttaaaaattagagaaagagacccagtgaaaaagaaaaggggaggccaaaatcacaaaaatccaattagaatggaacacaaacggcgttcttatttaattgcaaactgccagctcaccaggtggccttctgaaggcatctcaggtcaaaaaccatcacccatccctgataaagccatttgcctacattccctgaacagaggggacagtggccagcctctgaaaatggtccagctgtgaaagcccagaaaccccaagccgcttttgcagcaagtgtgcacaggaaaacggcaggtcccacacatttcccggcactggacactcagatcctgtctcctcccagggcaccccagttctacccatggcccagaccctcatcctgtcaaaagtccctaggacaaggcttgagacaaattaagaattttattgaaatttttatttcccaatgcagccaagctgacaacctctctctcaagtttcagcctaatgtgatttcaaatggcagccttatacacctctgaaaaatggtgtttataatcaaagcaccagcagctccttaactctaggggcactcctgggctcagctgtaatgacattagcgtgtttagagctgtcagaagcaatgtcactaatctgcgtctaggagggaagaggcaatgataaatgaatggcgtctctcaccataacgggtgtccctggtccgccagctacctgcctggcaaacagctatgactcagtccctgctaagcagaacactggccctctccctggggtctgggtctgcctggtaggcttggacaatcacagtacccaggcagagaaggagtgaatcagaagcaccgtggtgatatggaaaccactgaagctaagaaacacggcagcacttggtgagaattcaagaaaatggcctgcctctactcatgggaacaactgagcccaagccccaagccgactgccaacccctgctttcccatgtcacactcaatcttttttattttttctttttttgtggagtcttgctctatcacccaggctggagtagagtgccgcgatctgggtcactgcaatttttttttttttttgacacggactcttgctctgttgcccaggctggagtgcagtggtgcgatttgggctcactgcaatctctgcttcccgggcttaagtgattctccttcctcagcctcctgggcagctgggactacaggtgctcgccaccatgcccagctaatttttgtagttttagtagagacaggtttcaccatattggttaggctggtcttgaactcctgacctcagctgatccacccacctcagcctctcaaagtgctgggattacaggcgtgagcccggccacacctttgctcttgacttcatcttataaatgatggaacacataggcagacgtacagctccattttccagcgcgtaaaacaagggcatgacagtccaattcttgggggtgtcacagggatgctggggaatgacggattacagtgacatagatggctcagagggtggcacacagcaagccctcagcaggtgtgacctgctgtcgtcctggctgctatcattcctcatcacttttattagcttctgttaatattgtaatgaaattaagtgacatggcatgttttcccatgcagactgaattccccagggcctgagtccactcccacttttgtctctgaccccagatgcaactagaaatgcactcaaaatgtatatctccctagcacatccgccagaacaaacatcagcgtgccgtccctgagggaccaaaacagacatccccagagcctctgccccatgtctcacctgcagctggggctaaacagtcatcattgcaatgaatcagcacaggactttgattatggaaccatcagcatccccgtttcagagaggagaaaccgcaggatcagaaagattcagcaggaggagaggcgggaggctgacctgggtctggaagtcaggaaggctggtgcttcacacttcactcccatgtctggccttccatgtggcccctcccacaactcacaagatgcttctgcaggcaacaccagcctcccttggaaacagaagggccacgacagggcacacattcccgtgtcggatggagttggtggggaaaagataaattagcaagagtgggggaagaaaaataacttcctgaggagagagcagcggtgctcagttttctgggaacacgcacacgcggactcagagaaacacacacagcacaagcacacacacacaacatgagcacacacaaggacacacacagatgtgagtgcacacagcacccacacaggcaagtgcacacacagaatacacacaaaaacccccacaggtacaagtgcgcacacacacacacgcacacacacaggcacacctgtcagcttctggcacaaagctaacacaggctcacatagaatcacaggcactcacatacacacacacaccacacacacccacatgctccagtcatcctcaaccccagcatagaagcattaggcccttgggcacagccttcctagaggaagcagcagaacttgctcagagctcacttccacaactcctccctccctccccaccccctgtgcccctgcttcagacctgggcagcccctaagttctctgcaggttcttgagcctccttagttctggcagctgaagtccccagcctctagggtggcacccagggaacagccatccaccccaactagagagggtggaaatctactgaagggccagtccggctcctggaacagccctgggggcaggtgctccctgaagcccataggactctgtctccttggcttctctccctgcctctcccttggcctttctgtagaatttcacagccactgatatgcaggaaacagcgaatacctggtttcaaaaagggaagccgtgctcaggagcctgaacacaggaggcccgaaacagggcttgtgttgcatggacctgaagccagaggtgagggcgattaggaaattctttcccacatcaggggaaggatgctgttgaaatgggaggcccaaggcatctctgcaggacagagactggacatatgcccagagaggttcaggtccgtgagtctggaatatcctcctcctccccagggacaggggagcaggtctggggcaggcccattggttggaggacggggaaatgagctgtagatggtgcccctttgaccctctgatccatcttcctgtgcctcacagtctgaccaccaacactatgatcacatagttcatgcaggttctcgtaaattcattccttcactctcgactgtgaacaaatcggctgttgccttcatgctgctgaaaagctcgtccaccctggctgtttctgctccatgcccgcctgtctgcacaggggagtgccctgccctgagggaaaccaggcattcttctgggccagacagtctcctggaaatgaggaagggagagaattgtctaaaactgctggaaagttgaagagtacaccacatatacacagaagcatttgtcttttcaacacactttctctccccttcagagggaccagggctgaaacctgagctgattcagcccaaaggagcttggtgactgcagggagtccactatcagcaacctccttcctcgaccccaggagcccagagtctcacctgcccagaatgtgccaatcactcattcattcaacaaacttcctggatcaactgggccctgggcaccctggtgctgagatgaaaggccagcctccactgcagggacacactctggagagagagataagactccaccagcgactccacatatggctggaagatctgtattttaagagaaacgtgaaccagaacttgcttaaccccaagggttgaatttcaaacacggaattggaggcattggtgagcaagatatgcacacacacggcatcatacagcctgctttctaagcgcaaggccaaggggaagaggtggttcctgccacactctgggaccccgctgggtgactgtggcctggcatggtgagctgggggccagccactgccctcaggacagcagggtcctctgcctttcccccgcagagtggcctggcctgcctcatgcttcctgcagagctggaggctgatggactccagacccagcacttctgctgcggcctcagccattctcccagctcctccccatctggaggtcgtgggtagccctgtgagggtgtgggcttgggagccagctgagcttgggagccaactaggcttggattcaaatcctgcctcggtccctctgttctctgaatggaaatcctcacctacagtgggggagctggcagtattcctgcagggctgctgggttgaagcacaggtgcaggcacaagccttgctcaacaagtatcgggaggctcctcccatctggagagcacccagggcacggcatgtggcccaacaggaccaggctggagatccagggaaggcggggatggggaagccccaggaaccccctgcagacaggaggctctgccctgagactgcttcctcctgccaagcccccgcaattactcaagtgcaacaggcgctcgtggtaatgaagttggatgcctctgagtccatttaatgatatttaattatgcaccactttcaactgacaggctgagggagatctacacctagctcctgaccctgggcgggctgcactcatatataggtctcatgtagactttaggactgcttgtcagaaactgtgcttttgcctggagaaaaatgactcagaacaaagagagccggagagcctacaggcacagcgttcaggcaccttccagaggaacctgggaagggtctctaggcctggcctcctagttcaacaatatctcctgggcacctactacaggccagacattgtgtcaagctctgggaataaagccatgcacaagacagttgtgcagtacaacctccgcccatggggtttccagcaatgcccagatgggcagacatgggcatgggagaagggagggctttggagtggagaagaaatgggggcaagctccagaggcttgtgtgctttggggcctctgtcaaagagagcccccttttccccaagccctgtgcacctcccacccacactcacctgggtgccacctgtcccagcacctgagctctggacaacggaaacttagctcgttctccaagttgatttctcaaggtttgcatccaggaactatctagaggtgtaaaggttagccttaccacagtgcacagatctgggcacactcagccaagctgttggtgagataaggcgctgaagaccccacagtacccttcaggaggaagaccccaatcccactgcccagacagaacttcatcatgccatgcccgagttccagtcttcctgagatttttccattgttcttcaagagaaaggaaaggaaaggaagaaggtgggaaagaaagaagaaaggaagggaaaaggaaggaaaggaagaagaaagaagggaggggtggcaggaaggaagtggggagccgagatggagacagatgtggtaggcacgtgtagatcagccttgcccaggcttctgctgttcttggaggatgacgacgattctctccgtatttaagaagctgtgagtttggcctcctccagttccctggggcttgtggctgttttccaagccagtgttaagggactgaggacaggctgtgccctccacggatgggacttgctggacgacatcaagacatacaattccgctctccacagtcagaggtatcgccatccacttagtcagtctaactgaaaatgcatctgcaattcctgttttgtttggttttgtttttaaggattgctttccctagcctatcgatctccaagcctgacatagccttctgtaattgtacccgagcccatccgccagaatgatgaaatgcctgtagtgtcacctgccaatagtgatacgatttaccccctagaattctccccggtggaggtagcacagccaggctcactgtcatccatgattccttggggaagatggtttctcaaacaagatgactgtgttctccccaaaagacaccaagtttccagaacgcttgcatggacagaacagaggacgaagccaacacccgcagttgctggggacaaccgagaaggctgctgtgcatctgtgctcagacatcagcatgtgccccagccagaggggcctcccaaggctgaagaggatgccgtgcacagcagaagggccatcctccacctgccccagagagcagtggcttcttcaaggtgcctgtaaaccaaaaagcatctgagacgggtctcagtcaactcagagtgtattctgccaaggttgaggacacacccaggaaaaagagacacaagtaggatctgtggcctgtgctttttccaaagagggtttggaggacgtcgatctttaaaggggaaagagcagcaggaggggaaggaggaaagaaagaaaaagggctggtaggtagtgaggagagtggtcacgtgcttctgaggctttgattagcgctcactgagtccacttgttgcagtggcaggagggtagagaaacggccaattatgcattcattttgtgctcagtaaatctgcactttacataaagtaaaataaagtaaagcatggagcagagaaagaagccagatgcgtttgtctcagggtgagtggaggaatgtctcggcccgtctttgtcccatagctgtgaaggtgagctggtcattgacgttgtcagcgtcagattccacagaactcatttgagagctagtttagaggggacatgcggattctgaaagatctgggggcccacaaggaattcccttgtgattaatcagtgaggaaagccacctggggagacgtatggccttctatcactgcagctatctcttcagagaagaaaagaaggactcagtttccaagcttcccttttcccttggcatagtgagtctggggccctaagattggattttcctttcacatgtctgtcccttgagccccgcactcatcccccagcattctgcaaacttccccaggccagaccctacggtaaggacttggacccaagcaggcagtgtagatggtgatcctgggaaacacccacgcgggaggaaagggacagcagccaggacaggtgtgacaatgagcaggctgctgctgagggcatactggggaggtgggcagggcaggccttaggctgtccccctgggggcaggtgggctggaggatgcatggacccgctctggtccatccttggctcctgggggcatggagtcaccaaaactcctgggctgccccacacagaccaagcccactcttgttccaaaagaggcccttgggagaaagggccacagtgggcatgggaatgatgggtgccaagcagatgtgggcatggtggggacagggtctgcagtgtgctgagtgcttggccgtggggttacaatgagtcacacagtctctgctctcaaggagctcccactgggcacaagggaaaaaaggacaggagacacagcccctgagaggctctcacggcctcccgcagcagcatcggtacccacacggcctggcctgaaagtccgcccggcctctgggcatgggagatgggcagaattccgtgctgctggcctgggatcctgtcaccagcaggagacagtaacagtaacaaaaccacaccacaaactgagtccacaggtctgtgcctcccacgcaccaaaccctgtctctggggatgacagtgagtaggaggagaaacgtgtttctcacatcgggagacagaaacaggaggcagggcgctgctctttcatctctcaggcgatgcatgttcatcacacacagagtccgggggggcaggagcagcttcaagtctctctgagctgggagctcacctctcacgggtcacccaacctctctgggttccagattccccatggggaagacccaggcacattaagcttccagacagcccagagtgggaggcagcagagtggagtggaggaggtggcgcccagcccacgctctgcatggtcaccaggctcctgagccagacatgcccccaccgcccctaccgggcagcggcctccagctgcatcaccgtgtgtccagaacacagaactcacaggggcctccggaacctcctgccaggcctggtgttaacagactctcctcccaggaccccccatatcctgcgtgacaaaatagatgacatcaggaatcccaagatggagtgcctaaggggtgcgaggccagagtacaggtgcccactggccgagcgcctgctcccgaggctgactcagctctctggagctcactttgctctagaccagccagcgtgtccaccctgctctcctcccactcctcctggctgagagatctccaaaagcctcacccccacccgcaagcctggccagcttctgcagggtgggggcacagctggagccaaataggagccagccctcctcaaatgccctcctgtcccagctgagacaaaggagcctccagggagctgcccagaccctgagcgcatctcacctctcccgttgaggaggacctggtgtagaaaggagtgctgggtgttggggggtacaccttggtcattttggccttcctcccaccatgacccctcttgccctcaaagagtgctggacagaatctttctcagagggccaccccatcgggaagtcccctacgtatctaacctccatccatcatgctgtaaggcagcctctttcctctccttctgctgttagttgagatgggctggagccgagcttgtgtccaaatgagagctgctgtggacccagtcatggctccgtcagtgcccagcgggagcctttagtgagaatatcagtgacagggatggcagttgtttgctgaatgcttcctgtgggccaggcacggctaagtgaaggatctcacttaccatgtgatgatcagcctctcataggtcaggaggaggccaaggcagttaaacaacttggccaagacccagccatgggtgagcacagagctgagatgcagagtggcccctgccctgtgcctgcaggacacccgccactcctgggaggcctcagcattgggtgtcaggagggacccaccgagtccccccaagagcccctcggctgtgctcccctccccctccacttaggcactggcccctccagcagacccctcagaagcccagtgacatcgagggagcactgatttgcaatgacagattgagcagctggaaccctgcccatccatcctcagaactgccttgtgctcccagcaaccccacagccaaatcgcagaaaaagaggctgccctccagcacagccagctctccaggcttgcacctggacgcgtgcccactctgggcctcagcccctctgtctgtgatggaggccagaggcccctcccactcataacagggctggcaggtaaggggcaacattgccttcctgtggagttgcacagtccccagaagcaggtggtgatttaaacaccctgattcgcctgtaatcccagcactttgggaggccgaggcgggtggatcatgaggtcaggagatcgagaccatcctggctaacaaggtgaaaccccgtctctactaaaaatacaaaaaattagccgggcgcggtggcgggcgcctgtagtcccagctactcgggaggctgaggcaggagaatggcgtgaacccgggaagcggagcttgcagtgagccgagattgcgccactgcagtccgcagtccggcctgggcgacagagcgagactccgtctcaaaaaaaaaaaaaacaccccgattcacaacacaggccctgtggggcaccaggcagtggcaggcacaggtggcccctggaagacatgagtgccctggagaaggaaggctgggcctggggcaccctgggctgccctctgcccaagccacaggccccagagactcttcccacccaagccagaagtggtgagtcccatctctggcaagtctcagccctgccaaaggcagggtctctttcaccaggaactcagcgttctgcatcttcgagtgtctatgtaaataaaacaaacttctgtctgtctgccccccacgccctgccccatcacaaggcagccagcgggtcttagatcagggctgcatctgtggtgttcccactcaaagcagcctgggcgctctgtggtgcccacactgccctccttgaggactttgaaggcacctcggaggcagtccttctcagagtggctgaaactcagaaagcatcacaccattcattcggagaccccacgcatgaagagagctagggtaggttcagctacaagccccagatggaagggcccaggggcagggtcgagctgcatgagccactcctgggggcagccctcccaggtggcagcagctgagtgcattgttggtgagacgcatggcttttctgagaagcacgggtaagttggtgagctgtgctggagggaacgaggcccgccttccacgtgctcccctttcagctggtggcaggaggctgggccccggtgactccccaggagtgcctccagctctgggcttctgcagcatttcattcctccctcatggggcttgttggaatctgtgtgtccactgaatgggggtcatcatttcaaccacagcacccaagcacctcctcagcagggagctgtctttgtgcaggatgatgctggatacgctgctctgcactcagcgggagaggcaggtgctgctgggcgggtgctgcagggtggcaggtgccgctgggcaggtgcacaggccccctcctcagagcccggcatgctggccctgccagaaggatgccaggaagcaagaagtgggggcacagaaacgtgtggctgtggacaggcagagaggagtgcgagggcgttctaggtgagcaaaggctggaagcagaaatgtgctggtgatgagaggcccatggacatgccggggaggagggctgagtggaaagggcttggacaccaggctgggaggtagaggaaggagaaaaaaatgggcctggattggcctgaagctagagagactgggagaggcagagaaaaggaagcagcgataggggcgaagagtaatggaaatggaggcagaagagagactccgagaggaaagacaggaaggggcaaccgaagaacaggcagagaagaaaatgcgggtccagggcagggaggggcgaggaggccacttgcacttctgctgaggggtgcctactctcctccctggccacactcgcacctcctggaaaccctctaggtcccagccatggctcttgatatcccctgagcccaggaccaagatactatgctgcagccttccctctctagggctgccaagtcgacagccttctccaggtcctggatagtggctgggggtccctgggaggcaggtccggcctggggagggggcggtgccgggaggctgctgtctgtgccacagaggtcactaagaggctccctgctgtgtgacagtggccccagatcattggagtacagtgccgcaggccctcccagcctgaccttctgggagaccccagggcgtgccggaggtctggatagtctccctgtcctgggtccagggccaggcccgggactgagagctccgcacagtgaggcgcgcaccacttgagcccagcagcctggggaatggacctcgcctctccctcgagcgctgggaggggcgggtaaggcctaacaatgtgaccatctgcttcacccctttccactctctggctcctcctctgtaaacgagctccacaacattccagaccgcacgccaaatcggaaaactctggactcacaaccacgggcttaaatgcctaattaagctcattctttgaaccaagccatatttgaatgcatctgtcagccctcctccagctcgcctcgcagcggggtgggacagcgctaacgggagtgggagaggcagcgcagcctggcagacaggcccctgagccgtccccagcctttcctggtccccgatctgccctggtggggctgttcgaacgcttggtccctgaggttttacagtcaccagattcatctgtagcctttgctcctgggcctgcagtgaacccctcggctccccacctccctgtccccgtccctggaaggcttggcgggcacctgcctcggcttcagactcctctggtgcagcacctgccaagcccaggccctgccttgctggggaagctccgtgtagctgaggcctgcgtcagtttcctctatcccggaccagagatggatgctccctcccttctcagcaccctccattcaaaccatttgtggcagccgcgccacaccagagggtgcaggtcgcagcccagtgctctgaagagggggccacggggagccaggagaccacaggcgtgggttctgagcccacgtccgctgctgcctccccgggtcccggcatcaattccccacccgctcacctccctgagcctgcaacaagaggatgtggatgaacagtgttccactgtgtgtgtatattaataccacgttttatctatccgctcacctcttcatggtcattctcggcagcaaggatgtttagagaatgttatgctaagtgaaaaaagccaggaacagaaagacaaatagctcatgatctcactcatgtgggagctgaaaaagtcgatcgcatagaagtagcgagttgggtgctgtggctcatacctgtaaccgcagcactttgcgaggtcgaggtaggaggtcccttgagcccaggatttcgagaccagcctgggcagcatagtgggaccccgtctctacaaaaagttttgtttttttttttaatttgctggtagtggtgggatgcatgcctgtagtcacagctactggggaggccaaggcgggacgatcgctggagcccgggagttggaggctgcaatgagccatgatcacaccactgcactccaacctgggtgaccaagaaagaccttgtctctaatgaaaaaaaaaaaagaacagggtagaatagtgatgaccagaagcagggaagggtgggaggacagccagagatggcttaatggctatagaactacatctagacaggaggaataagttctagtgttctataacactgtaagatgactatcattaacacaatgtattgtatattttcaaatagctgcaagaacgaattttgaatgttcccaacccaaagaaataataaatgtttgaggtgatggatatgctaattaccctgatttgattattacacatttctacatgtattaaaatatcactgtacctaatgaatgtgtagaattattatggtcaactaaaaataataataaatgcaaaaaaaaaggatgtgaggaataactccactcacggccctccctggggtgcacctcctccgtgtacctgaccacacatcaggggaaggcacagagctgggacagaagcccagaggtgtcctgtcacccccctgctgcaggctgtcagcccctcctcatcacttgcagggcccagacaaggcagcccacccgccacaggtgatgggacccccagccacccctccggccccccaaccctgtgcccctctccccagcacccctctggttctgatgcgacaagccttctacaggaccagtggccacactgctcccaccctggccctcacactctctgccttctcttccagaaatgcttgccccttcctccttgttacctggctcccccgatcccttaggcctcccctaatcctcaactggcacccccagcccctgtgtggccccttccatcctggcacttgtctctcctgctgacctgggagctccaaagcagcaaggacctcagctgtctccctccctgatcctcaggttcccagcacccagggctgggccaggcttcagctgagtgctctgctgttacctgtagagtgagtgggtgggtggactttataaccatggcccaccagccttgacctttcatacagtttgacagacctcttgctgccccaggcagccccatggccctgaaggcaagggtacccctgtagcacatcccagggacagagccagactctactacctccaccccctgcaacaccattttctttcctgcccttccctgttgcaagcatattcaaatgtttaaattctgtttggggaacaattagcctgacatatggtctcatcacgttttgtcttccgatggaaaaatccaggggaaacttggaaaatgatgactggcgaggctttaacgtgtttttgctttttttgatggtcacaagcaagccacagatgaaaagcctgttaccatctggtccaaccctctcatctgactcagggggaaactgaggcccagtgagaagaaggtaccagcctaaggtctcccagatgcaaaatccagagcccttggcacttgcctctccgcctcaataaccttcagagagttggacctaatctttgcagtggggtggtggaaagaggggcttttagggccaacatgctcgagttctgtcctcgagattgtgtggctggaaggcttcatacccctggaccataagaggatggcagaatggggaggacctgcagttccctgtctagacccctctttggtatccccatcaggcaatggcttggccaaccaggcccccgcttcactgcccagtgacgtccagaccttgttgccatccaccctgcagctcctaaggatccagacggcatctgccaagaagatacagcaagcctgcctggaatcagaacccactcctgtgactgccagaaagagcccactccctgcatcttgccccgctgggcctcatctttcctggggatgggggtgaaatacccagccactttctggcccctagaggcccgatgtgcacatagacgggctggatgacatgtgcctgggctcacttatggagcatctgtcccctccctcaccacaatatcaaatcccgcaagcagaagcaggaggaagtctgtctctgcctgcgtgtggtagctggcacatccctggtgctccatgctgtgggtgcccggccactcgcctctacaaggacagtgctgtatgctgacaaagcttttccattctgcataatggttttgtttggtttttgttgttgttcacaagaacccaggcaggtatgattattatcatgctgactttgtgaatgagacaacggagactcagagagtgaaggcgacacattcagtaaggggcagggccaggatgtcccctgtgtcataggctctagggagctcaggcactcctagaggggagatgtgaaggcatctccctgggctggagctgaatgaggataattcccctccctttgttctgcaaggagtggagtccctggagctacatccagtgccatggtccagaaagggcagacctgtagccaagagatgtcccccaagcaccgtcacatgcctgaggtcctgaggatgctgtggaggggccaccctcagtgcacgcctgagccgacactgcagagcctggctgtgtagaggttcccaggaaggacctccagcaagggcagggctagatcccgcctgcccacagggaaggagaagcacaggtggggagagcacaggtgctctttccctcccgatgtatcagctgggggcctagcgcacaggccttctgccaggagtggaggctgcatgggcattctgcaggccaccccgtccccccagaagccccaccacagacagccacatgttgagcctccagctgacagggcacagctctgacaacagtgagcagctgggggaccacactcgttagctcccatttaggagaaaaggcatgccttgtccttcctccctgagctgggctcctgcagggcctggccggtggcagttaaagcatccggacgctttcggactccctgccgcaggaggggctgcccggccagggctagcgggtgaccatgctgtgctgagcgcccacagaaagggctgggccctacagactaatccattgtaggggcatggatgggagtcgggaggctcctgttgctacaaaatgacagtccatccatccaatgttcactgctgccagctctgtgggcccccaagagccacacggtctctgacctggggagcacacagggaagagaagccagcccagaggtagatggcttagcctgtacatgtggcccatggagggcctggtaggcttcctagaagaggcatctgacatctgggtcttgaaggatgaataggagtttgcttccaagggcggatgggagagaaatagtccagacagaaagcacaggccatgtccagtcacagagctagaattcttcaaacccaggtctctctgctgtcaaagctggtactcttagaagctgcattctgctgcttgatgcagggggagctgcaaacaccaagccaagacttggagaagggcctaggaacgggcgcattcaggtgttgtcttcatccatttcggctgccataacaaaaataccagagactaggagagacttgtaaacaacagaagtttattgctcacacctggaggctgggaagtctaatatcaaggccccagcagatttggtattgcatgagggccccccacttcctcacagatggccatcttctcactctaacaaaacagcaaggaatctctcaggcctcttcaaaaatggcattaatccgtcaatcccattcatgagggctcctccccagtggcctaatcaccccccaattctccacctcctaaaaccatcaccttaaggaccaggatgtcagattgttttgttttagagacagagtcttgccctgtcacccagactggagtgcagtggcacagtcacagctcactgcagcctcaacctcctgggctcaaaggatcctcctgctcctgtgtgtaaatctcccacctgctgagagaagccagctccccaaaccacatgcacatcagactctatctccagattccatgtgaaatccaccaaacgtgggccacccaggcggtggagcaccgaaggagacacacatgaggaagacacaggaaggggctctgtgtcacctgggactggctctgggaggatgctgcagcattggctctcagggacacagagcaggcagggacaccctctgggacagggacaggacagttagagtgtggaaagatggggagggcagaggacacaccacacagaagtgtggtacaggcaaaggcatcgagagagaccctcccagggcaggaggggacagaaatggtccagacagaaagacagcctggagggagccagccacactgatgatgatggataacatctgtggaaggtttggaaacaggaaatgacaagagcaaaaaataaaaaataaaataaggaaaattaacctagccatggtacagtcagaaaactactaagtattccaggaaaaggttggagagagaagggtttctaaatttcattctcagaatctaaaataaaactgattttctggcctctgggagctctggagaagctctggaagttgcaggacctgtgcagtcaccacatcttccagctttccagccaggtcatcgctccccaagtcccaaattgtgtgactgtgaccacgatggtctcaaggtgaggggcaatcagaagggctttcaaagacatgaggtgtgggctcagaggcatgcaccaactcatacatgccaactcatacacacacacacacacgcactcacacacatgcgcacacacgcacacacatgcactctcacgcacacacacacatacacatacacatacgcatacacagcagctcagcggtggtgcacattttctgttatcaaaggagacaacaaagaggggtcatgaaatgcagccagcagatggaagcccgctaaaatgtcagccagaagaaatagcccacgtcagaaaaacaaaattccagtttagcaaaatccttccctcctcccccactcctcagagaaaatttcccgtggaggcccctggaactttggcaatccaagaagagttatttattctggaccgccgcgccgctgtgcatgttaagtacaaaaaggaaaaatgctttcggatttggaaatggggttgcagtcgcagatggtgcctgaacatgcataaattcggtgactgcgtgaacagatggaaacttgaaggggaaaaaaaaaattaaaaaaaaacaacctagcatttatctgccaggccactgcggagctggagaaggggaatctgtcacttgactaggagggtctcggtcttccaatctgtgggatgggggtaagaaaccaccatactcaatggtcattcccagctgagtttcagccctgtctctgccactgaggagctgggggacctggccccttacttaacctacttcttcatgtgaccccggggataatgcagatgacctggcagggttgttgtgagaattgcctgaagtcatccatgcataggacctatctgtacctagccagggcgacagccccatgagtggggcctcacttgccagataaagcccggagtagcccagagaggaagatggagcaccctgaaagctccactggtcggtcccacaggagaggggctggggagagagagagaggaaatagagacggactcctcccagcttcccctttccagaaggtttctgggctctgggcaagagctgcacaggcatgctgttcaggagaagccgacggtaggccaggctgcaagggctgtgccaagaaagggtctgtgggcaggttcagtgggaacgtaggaagaatgaagataacttagaaggagggttctttctctttttgtttttgagacaggggctccctctgtcacccaggctagagtgccggggtgcattcatggctcactgaagcctcaacctcctgggctcaagatcctcccacatccgtgcaccaacacacctggtgatatgggtcagactttgtgtccccaccaaatctcatcttaaattgtaatccccaggtgttgagggaaagacctggtgggacgtgtttggatcatgggggtggttcccccatgctgtcctcatgatagagagtgatttctcatgagatttgatggttttataaggggctcttaccctttcacttcctacacatcctctctcacctaccgccacgtaagacgtgcctgcttccccttccgccacgatcataaatttcctgaggcctttcctgccatgaggaactgtgagtcagttaaacctcttttcttataaattacccagtctcaggcagttcttcatagcagtgtgaaaatggactaatacacttgggtaattttcttttaattttttgtagggacaaggtctcgttacgttacctaggctggtctcgaactcctggcctcaagcaattctcccacctcggccttccgaagtgctgggatctcaggtgtgagccaccatgctcagagccaaagggaaggttctatccagggtgcccagagattcttagcaagtcagtcctcagattctgctccacactggggagtccacatggtacggtgaattgactgcaaaaaaaatagccacagttctccacccctccctgcctccaggcccccaaggacattttgcagctactccctgaggaggtggcatctacttctccaacctagcagggtgacctgctgtggctgacagaacccagtggcagtgagtgtgtgtgccaatgcgaggctgagctgccactctctttggcgcttctacttccaccaggaggacaggcccaggttggcctgctggaggaggagatgcgtggagcagagccacactggccccaggggcccagccaagggccctaggtggaagaagatcccacagccaccttgccaacccgcagacaaccacaggcccatgagtgagccctgccgggcctggctcagatccgtagagccacaaatgacccactgttgcacagggaaaaaaaaacacatgtttacaattgcatgtcaccaggtctcagtggtttttatgcagcgattttgtgacaactgacactgacctaccttctttcaccacactcccactccaaagcaatttctggctctggagagaatgggggttggggagagtctcagcacaaacccagaactacagttcaaaactcagaaactatgattcagaggcaaagggctccctccccatagaccatggcaacagctccaccactaagggccaagtcaccagattgtctgagagtccctctgcttgcaccactagtttccctgatgaaaggcagaaacgccagccatctctgaccgaggccatctctgcatagggagcttctggccctcagctgtggggctggcactgcagagagggcatccccacccctgcacgtgcccacacaggtgaaagaaagcctgagcagctgcccccagcacaggctggaaaccctggagctagtcaggaaggcagccccagcagaactctccccggcccccagtggatgcctccagggaaaccctcccaccagccccacacagcctcacagaggcacagatcctggattgttttagctccatgcagcccagcagggttctatctaacacttccctgagtaatcataacctgccaaggtgatggggcatgtgcccatcggggtggccgtggcaggcagcgtggtgagctctgtgatgcagagtcagggatctgagctccacctgcccctagtcctgggcagacccctggaccagcctccaagttcatctgaggcctgagtgctgcagaggatggtcccaggggagagagcctcagcaagaaagaaggagtctggccgggcacagtggctcatgcctataatcctggcactttgggaggccaaagcaggtgaatcacttgaggccaggagttcgagaccagcctggccaacatggtgaaacccagtctctacaaaaaacagaaaaattcaccaggcatggtagcacatgcttataatctcagctactcaggaggctgaggcatgagagtctcttgaacctgggaggtggaggttgcagtgagccgagatggcgccgctacactccagcctggaaaaaaagaaaggaaaaaagaaggagttgtcttctcctcccacccatctctgcttctaaaactgcccatagcttgtctcatttgaaaacacttcctggagaatcatccctcaattttcattaattatgaatgtaactttcctcttactaaattcaactttcttttttccagttgctgtaaagtctcattcctcagagccatccagggtgctctcctgggcacagtcacctctgtctggaatgcctttccctacttttctatcctgcaaactcctgcaaatccttcaagacctaccccttttccatgaagtcttccatgatttccctgaacagtgttaatggcaccatcttctgggctttctgaaacccaggctgtgtattaatatctccatgggttctgaccacagatcagcaaactgtggctcaaaggccaaatccaactcacctctcatttggcaaataaagtttaattgaaacagagccaagcctattcatttacttattgactatggctaccatcagactacaatactgatagagacgatatggcccaaaaagccaaaaatatgtgctatctagtcctttacataagtatttttgtgcactgagccctgcccgagactgtgctcctctctggggctaggacaagcaagagggccgcttgccctctggaagaaagcttgctgaattaatgattggatgaatgagtgagtgatggagaagcccatgttttcaattcaatgcacaattcactgggccagtgtttccagagggccccgcggaactctgcatggaccaccgcatgcatcagggtttcagtgtatactgtccgccctccacgcccatgcattctgcatctgcagattcaaaaatatcaaaaatctttgggaaaaatcaataaaagcaatacaaaaattaaaaataatacaatttttaaaataccacgtaatactttgaacgtagcatttgcattgtattaggtatcataagtaatctagagatgatttaaagcacttgacaagatgtgtgtaggctatgtgcaaatgcaagccattttacatcacagatttgagcatccttggatttggggaaccaaagcaggtcctggaacctatgtcctgtggatgcccagggatgaccaaaagaaggtgttacaggcttcaaggcgtatgggcaacctgatatgctggacagcgccctgcaccacatctcagctcatccttttgctccagcagttgcaggagaaaccagaaggaggtgctggcagtgcctctgtggcaatccacgtggctttctctgcttttgcctctgggataccccggatacccaggaagccactcagccatctggtgcatatccaccctaggaagtgcaggggagttaaaatccacagcgactccagtgggcaattctgatgcatgttctacacgctgccccagagggtctccagtcacccaccatggtctccctccacccctcttcacctttcctgagggtgcactcctgcttcccgggaacatatcccccaaattaactatctacacacaagccattgtctcaggctctgcttcggctcggggtatgggatatcagtctccagcacctgggtttaacctggtctaaaccttacggcgggacttgtcagcatcttctgtatctttaatactctgtcaatctccagcaaggacatctggtaaatctgtttcctggggctgcagcaacaaagtgccacacgccaggtggcttacaacagcaattcatcctctcgcagttctggagccaagaagtccaagatcaaggcgtccacaggtccacgctccctctgaaagctctaagggagggaggccctctctgacacttgtcaatctccctctcattcctcttctgacaccactaattggatttgtgcccccccaatccagaatgatctcatctgcagatcatttatttaattacatttgcaaaaaccttatttccaagaaaggtcctatttataagtaccaggagttgggacttcgaaattcttctggaggaacactagtctgcacaggacgttcagtgagtggcatttcttacacttctttgatggtaaaacttttttatccaccagagtacctctcaggactggtgctcttcaggaaaatgtgtgttcaccagtattccccaagaggacgaaggccacctctgtcctgtccaatgctgcagcccaggacctggcgtggtacctgtcatagacactgtgccagcaagcaggctgggagcaagctgcccagacagggagaagctgggagagaaatctcagcacaggagcaagagggacacccaggaggctcatccatggtcccttgagagctcctgggctgcctatctggagctccagagagcgggctggactgagagctgagccagccccgggctggcctccccgcttccctgcgggcagagcctcctccagccacagcctggctgctggcaccagtgccttcctgcctcggggaatgcctggttagccctgactgggaattcaatgggggcctgcaccaagccctccactccattaagctccccactccaccaagccctctactcaaccaagccctccactccacttcctgaacactcagagagtctgatggggacaaaccaggtgctctgaggcacccttggcagacaggcatgaaggattagaaacctctcctaaggtacactcacacctagccagacacacctctctgtggggccagactgttcttgaagcagccctctaggggcgcttgcagagggagtggggcactgtccacacctctcccaacccgaggagctcccaatccttgccttctgggtaggtatcagcacaacttcaacctgtgggaggccccagttctccattaacgcactaggaccaccttccaaaggccagaagccagtgccgctggcacttggcttgtgtttctcttgaggtttggaatgaagctgtccatgaacttttaaaatggctgctgggcagtgagcccccaggctgcaggtgctgggccttctagagctccgaaacctccgcgtcaggggccaaccccttcagcaagttgcttctgcagcagtgagtaacacacctgcacacggaccagcttcctcccagggcccttcctatggaggccactccagaatcccttctcctcgtctgaccctctggaccctggacttccactgcagcctcccccaatttctgtggcctccaaaaagcaaaccctccaaagagaggtgcccccactctaacaatacactgagttggacaaggcagtgctggtgagcccaagaccctccccagggggtgcggtccctgcagggtctcattaggtgttagtggtgtccccggggagggtctcaccctcccctcgcctcctccagccgctgaccagcacagggccccacatacaggagcttagagcgggtttgctgactcattggaaggcaaccagcaggtagggtttccaggctctgcctcaggaggcagcctgagatggacctaccagtcatcttcatgggcagagcagaagtgcagaggaagcaggcatttgtatttgatcaggtttttattcctggctcagcctgcaaacagtaaacatttcattgcttgtctcacaattacattaaaaggtagataaaccccttctagcttacatttggcatttcagcctctaatccaacaaatcgccctttatcccctctttcatacgcacgtgcgcacacagtcggggctctgtgaccggcagggagctcccgcctcccatcttcagcagagcagcccggctcccggcttcagggccacacacagcagggccccagctctggccaggctcttacttgcaggacttctcaggaccttcgtatcctatagcagcttttcctaaatgccctggattgtaaaaggcccagcccacatgagtcagtaaaggaggagacaagtagggccccatctgctgcagccaggaccggtggcgcccattgtgtcatgtctgtcccaccctcgtgagcagcagagccagagctgagcacagcctggggtcgtgtcaccaggtccaggtgctccccagggaggtctggggctggggaaagccctgagccactgtggaggggaggggcccgggctggaagcagaacatcttctttctgaacccgctggggcctgcagcactgtgtgagctcaacccagctctcaactgcctctgggccttctctcgcatctccaggtacacaagcacagcatggatcacatctggggccgcatccagccacttgattccttgggaagcaaccccacagtccttcaagcacactccctgttcccaggagaagctgcacatggtgaggccaccatagcctgctggtggcagcctgttggccctgacccataccaggctgcccgtgccaggcagcccatgccagctcagggctcccttctccctgccctacagctcacaaacccaggccttgattctcttcccctaaaggcaaggaccctctcttcccagtgcctctccctctgcccttcctgtgtctggccttccccagaataccagttcaaagccagggaaatctaggctcctgtggccacatgtgccagaggcgacatacgcccagctttgggggcctatgtgctccaggaacatgcatatccaggaaggcagtcagcatccacctgccccacactcctcccttgatctgggggtaacttccctctccaaatgaggggtgcttttggagacttcccaccatcatccccaaaagccctgtgacctgagccaaaccagttaggctccttccctgaaacttttcccaccggaactagggaagagaggccacccatcactcctgagggggtggggcaagtagctctcagaggtggtatgcattaaagagagagacacggagcagggtggggaactgatccctgagatagcccgatgcttggtcccattgtccctggggctcagtggccctggccggtgcacccaagcttgcttacattgggtttggctgctgctggggagccccagttgctcctgtgacccacccccacccttctgcttccactcagtggcacagtgcagggaggaccctggggtagcggttgggtgtcactccaccaggaaaccccggtcacagcttgcccctcttgggcacagtttcccatctgtggcatgatcatattgccttgggtggtctcagtggctttccaaactcaaagggtggcggctcctggctcaggtgctgaacctgccctgctgtgtggccacaaggaagtagctcgacctctctgacgctctgcttcctcacctagggacttcgaataatatcacccctcccctcacagagtcagtaggacacaatgagctgggggttttcacacgcctagcacagtgcctggcacgtggtgagagctggttgtgggaagccatcatcatcccagcacctcaactcccacacacctgagcctaagacccccaggaacacgcagcacccactggctggggcctcctccttccccagtaaagagccacaccctgaactggggcttctgcctcataagtgaatacctatgacgatcctgatgaccccagtaatgacgcataagcatcacacacacacacacacacacacacacacacacaattcacatgcctgtacatagtctcacacacagtctcacacatgcacactcacacaagttcacacacatgcttacagatgcacattcccatacatccacatgcatccacatacatgtgcacacacatacacataacgggtacaattcacacatctgtacatggtctcaccatgctctcataattgacacatgctcatatgctcacacagatgccactcacatacttatacatgctcacacatgtgtacaaattcacatgtgcacacaatcacacagtgctgccacactcacactgacgcgcacacacactcatgcacaggaaaacatatacacacgtgccctctcaagtgggtgcaggcactgatcatcacataggtacacagtcatgcacacatgcacataccgagtgtgtgcacaccctcactcacacatacactcacgcacacctcccccggcctcctctccacccacactcacacatacactcacacacacctcccccggcctcgtctccacccacactcacacatacactcgcacacacctcctccggcctcgtctccacccacactcacacatacactcacacacacctcccccggcctcctctccacccacactcacgcatacactcacacacacctcccccggcctcctctccacccacactcacacacacctcccccagcctcctctccacccacactcacacatacactcacacacacctcccccggcctcatctccacccacactcacacatacactcacacgcaccttccccggcctcctctccacccacactcacacatacactcgcacacacctcccccggcctcgtctccacccacactcacacataaattctcacacacctcccccggcctcgtctccacccacactcacacatacgctcacacccacctgtcccagcctcctctccgctcagaacatattagctgtcttttcagcccaatcaacccactttttaagtccccagctggaaggggatggccatgatcagactgagaccttacatgccacgtctcagccctagagtttttatggcccagttttaaacctctgataatggaggtttatggtgccagtgcagacacggcctgggcaggggaacggtgagcggggctggagtggagacaggcagtgtgcagggcgagagcgagcgtgtcagtcccgccagcccatgactcacaggacgtgcagcattaggggaattatcagcgtcagccctgatgatttcctggccctcgtgtaaaaaccatcatatattttcctaatatctggtctcaatttcctctccaattaatggtatttccaacccataatacactgatttggctttccacttgtgctctctgaaagcacaaaagggtccacagacaccgactttctccatcacggggggctagagctgcccccaccttgcctttattgtttaaatcaccgctttatgaatcatcgatttctgattcttccagctacctgtggaagtgctagatgcactaagaagatgggaacaggaaggctcagtgtccccttctgaggggaaggcaggactccctaatccccagagcactgatttggtgcccaagagcagcccactggcgcaaggcagggcgctaaggtgatgatgtggctgagaagcatctccccgggcccgtgtcatcagaagagccaggctatcacacttcctctctagtgcaggtaccagaggaaactgtctaacgctggggccagagcacctagggaccagcaggggacataatttataggaagaaagcctgctcttcactgctgcagagctaccctgttgggttaagcattgccctactggttctgctttttaaagttccagagaagacccaggctgaccgttctggcacctggctgaggctgagtgcagggcagggtgggtgggtccctcggcagtgggaggacaggacagcaggagtaatgagactgcctgctcagacggcatctgccactcacagagactcagcctcctggcccacaggtgttggatccagcccgtcactggagcgatggagaaactgaggcctgtgggcctggggtcaaggccagagttggccaccacagggagtgatctggctaatccaggcccccccagctgccttcttcaggggtcacccaatccgcagagctgtgggccaagagacacctcctccaaggaagccctccagaccaccctttcagcaagccctgctgtcatggcctggcctggccacgtccttctagaccaggggtcacagacaaactgaagcaagccaggtccagcccagggaggtgtcgtttttgtcatgtgttttatttttaatttttggaattcagttttagaattagatttttacacacacactagattttcatcgtcccttgaaccattggagacccatgttcctgcaggaagcagggagacatctggctggaatgaggtggcagctgtgaccctgaccctcccaacccccaccacatatatatatacacacacacacacacacacacactcacacacagctcctggaatgtgactttttatgctgtggaaatgctcaacatgaccctgtgcatgattctgagctccaagagcagacgtcggtactgcaagcccgccctgccctgccagccttggtaagggaccccccagcactcagaggtgaccagtctttgacccctggctccaggaggagacagctggcctgttgctcaccctactgccaggctattctggaggtggcacagtgcccagcttcccacagacccatccctggggaccatgtttcctgagacccctgctctcccacccagaagcccagagcccagaaaaagaatgagggccacgaggccatggagagatccatgatccatctccttccctccctccctgacactcagcgtccactacacacttcggctttgcctcgtgaatgcctatgtgcaaaccaggcaggacacgggcacgtgctgccaatccaggaggtggcatgacatttctcatgtgcctagggagacatgaactggggagaatgggtcacagatgtccacccagaaaatcagaggctccactctacctggaaccccaatcctcctcactccaggcccagacctctggctctttgcagggactacctgtcacctgagaaatgtttctgagagaagtgatgccagatataaaagtatataagtgtatgcatgtgtgtgtgtgtgtgcatgcatgtgtgtgtgtgtgtgtgtgtacttttcctcagaagagggataatttgttggaaagtacagattcaaaataaagttctaaatatattagccagtcaaaaatcctggtagaaagcatttccttcctttcctatgtatggagcatttaggtttggagacatctcaaactccagcaccctcgcagaggtcagtcaagtggcagaaatgacaggagaggcagatgcagggcaagagggaggaatgaggtttgtgtcctcatgggactgcactcatcaagataaaatcccatgatgacacccagccagtcagggtgatggtgacaggccgttcatgtggcatatgttaccagcaccccctgacatggtttagctgtgtccccatccaaatctcattttgaactgtaactcaacaattcccatgtgtcatgggaggaacccggtgggaggtgattgaattatggtggtgggtctttcctgtgctgttctcgtgatagtgaatgagtctcatgagatctgatggttttaaaaaggggagtttcccttcacaagctctcttctcttgtctgccaccatgtgagatgtgcctttcatcttccaccatgattatgaggtctccccagccatgtggaactataagcccaataaacctctttcttttgtaaattgcccagtctcgggtatgtctttatcagcagcatgaaaacagactaatactcccccttactttatgagaaatgtacctactctggaggatgtaaactcagcatgttcctaggagaatgatttgtgaggataacatcttatggtgatgggaaaaggcattaaacaactgtgccacacagcctaggggagctgcccaaacacagaagggccaatgcagctccagagccaccggtctgggagccctggaatgggcttgatgtcctgttccactttgccccagggaccttggctagactcaagtcacctgattctgattgctgaactccatccccagccccaaccaggcaaggcagtgggtcctgaggggaagtcagagcaagccaggttggaagagggctatgccagacccaaaggaggatggggggcatggcaggcagtaattgttgcagtgtctcagaggggtcctaattgtggcttcccagaaagcaggcatacttgtcagggagctgggagatggcagagactcagccatggtttaaagccagaagccagagcaagggtggaggcagggcaacacttccaccgtctcttcccacttggtgctcacacctgagaagccaaggaccaagaagagtgcagagcttggggcaggccctgccctccctgcctagccagcacgtcctcctggtctccctgtgcacctaaccaccctctatatgacccatggccatctgtctcaatctgttcaggctattataacaaaatcccatatactgggtggcttaaacaacacctttttttctcacagttctggagactgggaagtccaagaccaaggcagagtcggtgtcttgagagggccctcttgctgattcatagatggccgtctcctcactgtgtcctcacatggtagaagagatgatggagctctctgagatctcttttataaggccactaatcccattcatgagaactccacactcatgacctgatcaaataccccatctcctaaaacaaatgccccacctcctaaaaccaaatgccccgcttcctaaagccatcaccttaggggttaggatttcagcatatacatttagggggagggacagaagaatgtagtccacagcctcatgtaagagggagcaatcatgagtcactgttctgcctagaaccctccaacgtgcccttgaatcctggtgtttgcagcactccaggcaccccctgcccacgacaggcacccagtgcagcctggctctccaaaacaccactgggcccctctacccactctctgcagcatctggggactgaggatcagccctcccaaatcagccaagaagatgtcctaccctcctgcctgcctttccctatcaccccagcctgctccccaagggaatgctttgaagcttaaaaggtactctcctctctgcctttaagaagagctttgaggcctgagctgccaccagaagttgctggcttgggtcttggggcatttgggaagctgtgcccctcactgtgcctacctcactctcagctccagccacactggcctccttggagtgcctctgaaaggccagaatccctcctgccgagaatcttggcacaacttgtactccacagcccccgatcctcttgcttgctcatggttctcagtcaggggatactggatgatgtctggaggcattcttgttgtcacacctgggggaatactattggcatctagagtgtggaggccagggatactataaacatcttacaatgcaagggcagcccccacaacaaagaatcattcagccccaaaagccaggagtgctgaagccaagaaaccctgtcccaggcccacgttctccaaggctgccttctagatcccagcaacaagcctgtctgtccccactccactttgcagccccacaaccagccaccccatctcacctggccacctgcacagtgggtggacactgaggactggagacacagacaaagcttcacaagggaagctcagcagctgccctggaaaggtctgaagtgggacacagtgggaggcagtgacagagacctggaggcagaaccaggcacctctggacagctagaaagggtcctggtgagggtggggaggatttggggagcctgacaaaggttcagacacccacacagccctcccccgacatgcaacagtgacagccgccagggcagagaagatgctcagagagaagatgctcagagagggaacagaacacaggcttgggctcccccaagatgcagacctgctgcctacctctgccttccacctgttctttaactctccaggcaaaggctcagctccccagggagccttctggcataaagaaatatatccattgaagaaaagaaaaaggaggaggaaaggagggagcaagaatgtcaccacctctaacctaccattttctacatgctttcatctttctgcttaattcagtgagtgtttgtggaacatctactataggcaattctctttgctaggtgttttggagggagatggccatgagaagaggagaaattaagtcagcttcatggtcagagacatttcctaaaggagatactacattgctgttgctgctgctgctgctgctgttgtttgttgttgttgttgttgttgttgttgttgttgttgttgttgttgttgtttagatcaggggtcccgaacccctgggccatggactggtaccagtctgtgaccacccgtggcctattgggaattgggccacacagtgagtgagcaaagcatcatctgtgtttacagccattccccatcgctggcattactgcctgagctccccctcctgtcagattagtggtggcattagatgctcataacagcgtgagccctattgtgaactgcacacacgagggatctaggttgcacactctttatgaaaatctaatgcctgatgatctgccactgtctcccatcaccccaagatgggaccgtctagttgcaggaaaacaagctcagggctcccactgattctacatgatggtaaattgtgtaattatttcattatatgttgcaaagtaataataacagaaataaagtgcacaataaatgtaatgcacttgaatcatccccaaaccatccccctcccctggtctgtggaaaaactgtcttccatgaaaccggtccccagtgccaaatagattagggaccactggtgtagattatctctgtgtcttacactgttctaagtgcatcacatttgttaactcattctatcctttcaacaaccctaatagtgggtactactattattctcattttacacataagaaaacagaagcacagagaaggtaagtgactttcccaaggtcacgcagctgttgagtggtggaacctggatttggactgaggcactctgtctggttccagagcccaggcccctcccaccatgccctgctgacccttagaatctggcatttgagctttatcttgaaggatggttaggattgtacagatggagcccagtttgccagagagagaaagagagtgagaatgcagagagcagagccggtgtaggtaagggtttccagatgggaaagtgaactgtggttacaccagaggcggaggcagaggactgagctctcttggggagtagcgaagacctgtcctgcttgcgctgtcggtaatgaggctctctgggctcagggctgattataaactctacatacaagaccccattctcccatccctggtttaccagtggttcctgccaccagtaacggtcacacggtcacagcagtgacacattacatgcaagtgctctgcccagttcctcccctgaatcctcacaacagctcagccatgtgggtgctgtacaagcaaggaaactgaggctcaggcaggaagaaacatgtccccatcacacagctagtgcaacgcttggccagggcacttgccttgtcctcccaggttgcagagcctggtgctcccaagtttgctgctgaaccttcctctatcctccccaccaccaaggtctcccctctcctcactccttccccccaaccgccccctgcctgtgcccactccaccccccagagcacacgcagcctggcgactgctcacacagcctctcacaggcttaatagctccagcctgtagaaatggaacaaactgatggccatgtgcatcacttttatgtgcttataagagagtcataattaatttcccaaatgcacacaggactcaggggatagacagaatgctattcacagattgcacgatcgtttgacagttttaggcaaatgaggagcgagtattatttgcttttctaacgactgcctggtgcattttggtcttgatgatggcatttccaaagcaatttcagaaacagattagagaagtaacatttttaatctttagcaaaaacctaagatgtgagggagattgtaatgtctgttttttcagcacgatgttttctagcgttagggcaaaatgtagcacaaaatgaaacaacatcacttactgtgtaaacagttacattatctccaattactcttcagctatgcactaccccacccctctcaaaagaacaaaaaagagagcccccttatttccctgttccaggggcctgaatcatcactgcagctgccctgaagaccataacccaccaggaacagggaaaaccccctacccgactctcgccgcctgaattccactgttagaatgcacttctccagcaatgcaaatcctccaggaacagtggtcactttcctgcaaaaaataccagcacttaacttggtggaaaaggaggaagaatccagaaaacagcctgaaagtacagaaaggggacacagtattagcatcatgggagggaaggacgggcaacgtggcgcaggggtagcaggtgcaggaatgacagttatcgggctgagggtgggcagagcagtaggagaggggaaggtgggaggtcagtgccacctccgacactgctgggctgcgctcactccctcccttggcattccccatccagccaacagcagcacctgcatctccaccaaagggcagtctctggtcacagggacacactaggtcagcggcctgagcacaacacagcaatggggcgctggagtgcacatctccaggagcagccctcagcacgtgatgagtgggagctggaggacaacacacagcttcctggccctgcaggtggaaacactccccagtgtgtgccaccccatctcccgggctgcccaggggctgagcctcagtggcctcagtggtgtcaatggcccacggcagtaacctgcttatcggcttctttcccttctctgtctcacttctcgtctcctctccctatgcttcctggaatcagctcccaagccaactccctgcaccgaaagtttcatcctggggtggagggcagcttcagcagaagacagcccctctcactggcccatcttgggtcacatgccatccctaggccaaatgccatgtccagagaggtagagcatggataggccagacctgggccccatgcctgccctggaccaagggatggggtcagacccacccgaaacacacagatgagtggaggaggggagttcccggggaaaggtcagggcctgttcccagaagagagaattctatggccagcaggctgagcagatgtcgacagcggcccgccatgagagggtccacacgggtcagcgaagcaccgtcttggagggcattcgggtggaattctagcagaggctgcactaagtcagtggttcagggcaccagaagtgagtgagctgggagtgaatgcctgtcccccgccgcccgccgtcaggggttacttggtgctggggctgaggggcagagccacgggaagtccaccccactatcccacagcacaactggctctgcctcaggaggctgggtggcttcctcgccccacccaagcttccatccaggcttagagatccatggtagggggcttgctacaccccaacttccggctcagtgtttctgtatcccaggctggaatgagggagcccacggagatggagagtgagctccctgagggatgatggtggcatctttctccaagggtcccacatcatctgatataggacagaacccgcagggtctcagagatgccattgtttatataacttgaccctcccagatgccaggagccctggggaagcctttcccaaaacgtatgcctcggagctcctagtttgacaaactggtatgtcctgatatggtgtgagtgtgtgtcccctccaaatctcatgttgaaatgtggcctccagtgttgcaggtgaggcctggtgggaggcgcttgggtcatggggcagatctcttatgaatggcttgggccaacccctcagtgatgagtgagctgtcgctctgagttcacatgagatctggttgtttaaagcgtgtggcatctccccttgctctctctggctccctctctcaccatgagagactcctgctccccctccacctcccgccatgagtaaaagcttcctgaggcctcaccagaagtcagatgctggcaccatccttctcgtccagcctgcggaactgcgagccaaataaacctcttttctttataaactgcccagtctcaggtgttcctttatagcaacacaagacaacacaagaatggctgaatacagttcccatacagggctgggttgggcaaaaggggatggtgtgattctcccattaagaaaaagtgggacagggtggattgaatcaagttgaacaggtgtctatggcagggcctctcagggtcttcattgcatgatattgctatgacttgccagaaagagccatcacatgcggcgtttcccagactttgctcagaaagtctcagaagtgtgggtcaaggatcctcatgtcggaaaatgctaaaccagcaaggccagtgcccattccctaggagcagccaggccacaggtcccattccagacactctgccaaacagccccacctaggttcctcacacacacctgccaccacccacccccaaatctaacatgaagtacaaccaagctaagccagcaaagtccagtgcagcttgttaagccactccaggctagacacagcaaagcctcgtgttgtcattgtgctgaataggtcttcagactttccagtatacagtgtgacaataatgaagagacttctgtggctgagtgtggggtcctcataaccctgaatgcattttcatgtcagtgatggtcagtggtaaacatctcctgccattagctggatgagacaccttattacaaaaattgcagcagaatcttcattgttttctatttccactattacaaaattcattttaagagatgtttgtctttctttttgctttttgatgtgcagcacagttgtctaatagctcatctcatctctgataagacgtcatcctcacgtaatcattcttccaggatcctgctggttttacatcctcttacagtaggtacatttctcgcaaattaagtgccggtaatatatgtctacctgtctagtggtgtcaccataaacagcctgtaaccgtcgccccaacactccccagggacacactaaactgactgtatgtcaccatggtgttttgtcttgatgagtacacattttaaaagtccatgtcctagcaagaagaggactaaacatagagactttccccctcgaggcaacataccctgtgaaaatctgctcagcgatgtttgaatatctcattgaggctcccacatttgcagctcaaggctagatgctgctttacctcttctgaatcagatggaagaggctgagtttggtccctttggaacccaagtgaagataatcactcagccctgcaaataagcagagaatttaccagcccacagccatgttcaccagcctgcttccgtcactcatgcgtacaagatactttgccatttgaacaactcttttgtatctagtatttaattttatcctcatcatgggtctgtggtatagaggagaaaacccacattcagggacgggtaagttttgctcaagggcgtgaggtgcaagcagcagtaggagagacagaattctcgggcagtgttcttccacttcctctccacttcctcacgtgtccttgatgaaaaatcaagctgggctctgggacgggtgagacagagttgggtctgcgggaggactttcccagcagtgagtggggcctaggggcttggaggcagccacatcacgatgtggatccagacaggggcgccccctctctcccctcacacctctctccctctctctctctttctgtctctctgtctgtgtgtgtgcacacgcacatgcatgcacgcgtgcatgtgtgtctgtctcctaaattgctaaatcgtctttctctgcttttccaaatctcccatctgattatccctcttttcttctcccaacctctccctaggagccaaatgaaggtgacagtaagctcaagcccagcctgtcctggcctagcctgagggcctctgctaaggtggaccccaaccagctccagcccagtgaccccaaggaagactctacctgcccagccaaacctaggccaccagtcaccccacccaggccagctcagtaccgcctccacaaagctcccgtgatgccctctccagggcagtggcacctccttccagtcctctctgcctctgtttcccacccacccccctacatccccctctgacctgggcactccatgggacagcttgcatgtcactcccctctcacagagctgggtgcagagaagaacatggtgggcgcctttgctgagcaagaacaatgggttgcaccgtgcagcctcacccacctcacccacatccccagccccaggtgccacggtagggactgaagcgttgacagccttaccaccaggcacagccagctcccagccaggcacagtccctgccccagaatccatggagggcagctcccttcccatgcccctcctatcattccaggacgttaaaaggcacaggtgactctgagccctgcttcctgctgtgtgctgcaaatcagttgatccaggaggcttgtcatgcccccatccctctctccaaagagaaaagaaacctctctgccctgggggcagccagatacctctacaaggcccagacaaggggagctgaggtcaggctcaaacacctggggcctgcagcatatcatgaactgcacagcgtctgcccactctaggccctctccatcggcacacgattcagacccagagctggtggcacatgtgccccccgacccatctgcaagggctgctccaagtcctgcagaccatttagccacacctcagccagtttctcaaaatccttctgggcatagcgggggctcagcactctctgcagggcacagacccacccagagccagtccttcctgaacccgggctgacggccctctgcctccaccaccccaatcgcagggctctgccatgcttgctttctggcctgcagaattcccagttccagcagcaggggctccttctccctctccccagtttgggagaccccagagtaaggaaggaggtcttacggtctggcccatgccactcccagcagtcacgttgtttagggtgtcaaggatcctggttggctttgaagccaggcaaacctgagtgtgaattctccctttcagctacatgaccttgggcaagccctctccccatgaatctcagtcaccccatctgtaaaatggtcagagtatctacttcctgacctcgctagaaatcgaggtaccactggcaagtgtcaggcccacaggaggggctcacaagggccagctccctgtccagcctcctcaaagcagcctctttctccttctccagggtcagggccactgccctgagtgtggacctgctcttgtccttgcagctcagcccttgtaccacccaaccccaagccatgctcagtgctgggtgatgtaattgtcctggaggaggggcactgatccagccacgcactcacccccatctgagccacgttagaagcactgcccataggggtccttaaagaagtgacctagagtctctaattagcaccaaactcccattttcaccctaatgagcttccagcaccacaccaacccaccacattgcagtgtgagaggagacctttggatgctgtcggtccaagccctttccccatgcccgggctgcttttctggcttcatcactagcccagcccctgccctaagcccgtcctctgccataccaggctccctgtcatgtgctgtgctgctcctcaccttcacacctgtgattgtgctgagccctgtgtgtagaatgcccttcccttccctcgccccctggtgagtcctcgtcactccttttcatcctgtccaatagggagccataagtcacatgtgatgagtgagcagttgaaacgtggccaatacaaattaaggcttgctgtttatgtagaacgtccatcagacttcaaaggctgaagacagaacaaagaatgtgaactatctcattcataaatgttttgcaagccgggcacggtggctcacacctgtagtcccagcacttgggaggcagaggtgggcgactcagccaaggtcaagagttcaagaccagccttgccaacatagtgaaaccctatctctactaaaaatacaaaaattagcccggtatggtggtgcgtgcctgtaatcccagctactcgggaggctgaggcacaagaatcgcttgaacccggcaggtggaggttgcagtgagccaagatctcaccactgtactccagcctgggagacagagtgagactctgtctcaaaaaaaaaattaattaattaattaattaatgctttgtagccaggcacagtgttcatgcctgcagtcccaatgctttaggaggccaaggcaggggggtttcttgaggccagaagtttgccccacctgggcaacacggcaagactccaccactgaaaaaagtttaaaaatgatccagatgtggcagggcacacctgtagtcttagctactcaggaagctgatgtgggaggatcccttgagcccaggtgttcgaggctacagtgagccatgattgtgccacagcactccagcctggcaacagagcaagatcctgtcttttaaaataagaagaagaattttgtgctgattatacagtaaaataacattttttgctatattgggttaaggaaaatttcacctgtttctttctaacacagctactagaaaaggtaaaatcccacatgccatcggctgtatatttctactgattagtgctgccctagaaggccccactttaatatggtaagaaatggctctagagccctcagcaaggctggaccacgtgtacctgtggatcccactaggaatttggtcttcatgcagctgtaagccattggagggtgtctggggcacagaggctctcacagctcctggagtacaacagtcaagaaggaagatgaggctcctccctgccacagctaatgttctagtggagaaatcagacaactaactaagcaaatgagggaagcgatgtcagcccccagtcaaaggtcatgaagaacgaacctgggtgatgtggaacggagtgactggggaaccccttcactggggtgttcactggtggccctgctcttgtccctcagggacaagaggtcctctcagaggaagcggcatttaagctgagactaaatgaagacctggagccaactaaccaaaaagctgcacagagaagcagcaaacgactgcctggcagggagccgggagtgagaagtggatgtattaggactcaggagtgttttggatcaaagctgacagagctgacggactggctgggaacaagaggaactgcccctgaccttggcaagggggtcatgtctcaggaggagcagacatccagggacgctggggatcttctcgttatctggccatcagggtacctaggctcctgtcctttgtccactgacttgtggtgactttgggcaaacctttctgccctctgagttctcatctctaaaattgatgaagaaccttgctgggctcccttgcagcagggtcctgagaacaaaataaagcaatgcctgtggatgctccattcattctgcaccctggcaggccccagtagggctggggtggtagaaatgagcactggattgaaacgctggtttgtgggtctgaatggaaaccatgcacagcgcacaatgtggggtaagagaagagcttgaacaacagtactaggggggcctcctgaaaacagggcttctcacctgggcctagatgcctactcattgtcaagcagaaacgagaagaagatagcacaacgagaggcagtcacgacacacgcaaaaacatggagatgggatacggcaaacgtggaaaacagaccacagggcactcaccggcctcagtgaaacgcccagggagaaatgccatctacccaacctatgtgaccgccaggaaatcacagatgcatcctgggaagagcctctttcattgcccaagatggccccagactggccccaacactctccaagacagcgccaacagcttgtcggtaagggcagacagcaccaaacatgtagacgagaaatgtaaaatgagtaaacattattgaaaggggctgtgtaatgccatgaatttttcagtggtaaaaacagctgagaagttattaaaaaatgcatgactttcatatttgattataagtcaagagcggccaaaaagagagggggagagagcgcagggggtggaggaggggggatggcaaaagacaccagcagcccggcagactggaattaatgaggttgttcctaacagggaagaagtgacatggtgattagttaattactattcagccgcctgtaattaatgcacaactgaaattggtgtacaatgaattaaactaccacataaagctgctacccaaattgagccgaggaggctattactgcggcttcaccattgtgatttcaatagtgtctccctccgacaacgtgttatgcaactagtgggagagtggggctggagagatggagggcctgaggtagcgcgtgatcctgatgctcacactcagaggggcctcccgctggctctgactagtgtagggtctgggccccagcaaccagcccagggcctggtccggagaaagttctcaatgagtgtaaagaggtggagtggggatgactcgggaggcacgacagatgaatgggaatggagaagggaaggagaccggaccgctgctaagaaggaagataatcatctgtttacatcttttctctgaagataggcactgctgttatctcaggctccatgtcactcatgtcctccaccccaggaccactgcaaccaggacagtctactgcaccagtccaggcaccaggtaccccttccaacacattctgcacacagcagccttttacatcaagtcatgtcactccactgcttaaaacccacctgtggatttctactgtaatgagaagaccatttactctccctgccatgcacctacaaggcctggtgcaacctgctcccgacacctccccacctcacctctccctcacccctttaattagatgacccagccatgccatattggtctttctgtgccacaaaatctccaagttcaattccgccccaggacctttgcatgtgctgttccatctgattgaaactctccagcttttccaagggatgagacctcagctcaaatgtcaccttctgagaaaggcctgccctggcttccctgtctaaactagtccctcccctgtcaccattattctctcacatgaccctgagtctgtccttcctggtctacccgaagacaggggttgttatctccaggtatgctggatcttgctcatgctccatttctcatcacaacacaggctctatacaggagaaaagcatctgttctctccaagtgtacccagggtcctgcgactaattggaatgagaagagacaggcaggaaggaccccttggaagcccctttgtaggtgatggggcttgtggctcaggtctagagctgctggagaagttctgggactacctattgtcatatgctgtcattccccctcaccccaacaaatggatcccaagaagtagtaggctgagagtgtggcagaaaccatctggtataagtaagtgactgtggtggtcagagactggcaaacacccacacaggctttacaaccaggtggtctcagtctctgcccgggctgtgatggtggtctcctccacacccagagacactgcttcccttgggccttcctccccatcctccagatcctgggacactaaagtccacgtgcctcatcccatctcaggtggtgctgttgcctgtattgggccacctctgggccagtcacagggccagaaggatgaacgctctgattggctaggcctggggacctgcccacagggaggtggaagagtccaggcccctccaaaccacagcagctgagagagagggagggaaggagagagggggatgggggggagggagagagagagacggagggagagagacagagagggagagagagagagggagggagagagacagagagggagagagggagggagagggagggagagcgggacagacagggagagggaaggagggagaatgagagagggagggggagggagagagacagggagggatgggaggggagagggagagagggagggtgggagagaaagggaggggaagagagggagagaaggaggggagaaggggagggagagggggagggagagacagagggagggagggggaagagagaggagggatgggggagagagagagagagggagggaaggaaagaaaagagggaaggagagagggagggcgataaagggagggagaagggaagggaaggagagagagggagggagagggagggagaggtgaagggagaaagacagagaggaaagaagaaagggagaaagatgtagggagagagagaagaagggagagagagagggagacagggagggaaggagaaggggaaggagggaggggagagatggagggaggcaggagagagagagggaggcatggacaggagagagggagggagggagagagagagggaggggagaaacagggagagggagagagagtgggaaggagagggggagagagggagggagagagggagggaggggggagagagggaggcagggatggaggaaggggagagagggaaggagagagagagagggagagagaggaagagagaaagagggggagagagagagatggagggagagagaaggagaggggataatgggagggagagggggaggagaggaaaagaggggaggggggtgatgggagggagaaagggggtgagggagagagggaggggaggggagagagaggaagggagagagggagggaggggaagcatcaaaggagaaaggaacagaaacaatagatgcccactgccttagcggtgacagacccagaattatcatggaccagcttaacttcaaaatgcaaaattttatttccctttctctttagtcttgagatataaccttggaacaaactgcagaggccttttcccttaacctcaaaatagactccaggttggtccctttcccactgtagattcacatcacatttaccaaactgcatgctagtatctagtttggtgcttacttgggagttccccgggctaatctggagacaggtgtaccaagcctgtagacccagctgcagcatcccagtggttagctcaaggtgactagtcaacaccagccattgtttagatgatgccagcccatgctccaggtagacagagacccaatgagaggtgacaacgtgctggtggccctcgcttgctctcagcacctcctcagcctcgtgtctgctctggccatgcttgaggagcccttcagcctgccgctgcactgtgggagcccctctctgggctggttgaggccggagccagttagctttccgggaggtgaggagggagaggcgcaggtgggaagtgcgggaactggggctgcgcggctctcgggggccagcgtgagttccaggtgggcttgggcctggtgggcccgcactctgagcggccggccagcgccacccgccctgggcagtgaagtgcttagcacccgggccagcagctgcagagggggccccggatcccccagcactgttggcctgccggcgccacgctcaaattcttgccaggcttcagccgcctccccagggggcagggcttgggacctgcagcccaccatgcccgagccccgtgcggtgggctgccgcgtgactggagcctccctgacagacactgacccctgctccgtggcaccagtcccatctaccacccaagggctgaggagtgcaggtactctgcacaagactggcaggcagctccaccctcgctcggccccagcgcaggatccactaggcaaagctagctgggctcctgagtccagtggggacttggagaacttttatgtctagccggaggattgtatatgcaccaatcagcactctggcactctgtgtctagctggggttttgtggatgctccaatcagcactctgtatctagctaatccggtggggacttggagaacttttatgtctaactagaggattgtaaatgcaccaatcagcactctgtgtctagctgaaggtttgtaaatgcatcaatcagcaccctgtgtctagctcaaggtttgtaaatgcaccaatcagtgctctgtgtctagctaatctagtggggacttggagaacttttgtctagctagaggactgtaaatgcaccaatcagcactctgtgtctagctcagggattgtaaatacaccaatcagcaccctgtcaaaatggaccaatcagctctctgtaaaatggaccaatcagctctctgtaaaatggaccaatcagcaggatgtgggtggggtcagataagggaataaaagcaggctgcccgaggcagcagcggtaacctgctcactccagtcttttcccacactgtgaaagctttgttctttggctctttgcagtaaatcttgctgctgctcagtctttgggtttccactgcttttatgagctggaacactcacttcaaaagtctgcagttctactcttgaagccagccagaccactaacccaccagaagaaagaaattgtgaaaccgtccaaacgtcagaaggaacaaactctggacgcactgtctttaagaactgtaacactcaccacgagggtccatggctttgttcttgaagtcagtgagaccaagaacccaccaattacaccaagatagccaccaaaacaagacacacagaccttgcacccaggtcagcccctgcatgcctcccatgtcaggtttccctgtacaaatccttgccttctccccagaaatttgaagtggcgggctttggatgggaatccagccacttcccctttgctggttttggttaataaaagtcacttgcttactaacagaccccacccttgtcaagtgggctctgcaagcataaggggttagacctgcattccattacagaattgtttgcagggagtgagggaaggatagagctcatgagagacaggtcccctacagagcctggggtgctgtgtccttgatgaggaacggaagtcttgggtttgagtcccagccttccccacccacgatgattgcagcaagtcactcagcctctgtgcccactgggctggggctgtgggctcagctcgtaccaggggtcaccttgggcaccctcaggccaactgtgcccaggttcgcctttctgcatcagcaggcagagccactcatagcctccccccaaccctcatgcagagaaggaaggagccagctctattttccaaccaaatgctgcacatggacttctggagacatcccccatctcagtgcttggcccccatctcagaactgtaagagaaggcaagatcccaggacctgtcgggcagcagataaatgagcaggactgccaggcctccccgcctctactctggcattatgagaaggaagccatagctccctccccatcagccttaaagggaaataactgccgatcctaagcagaaacctcatggggtgggtggtggaggctttggaggtgtccacagtcctctcctgacttcagttctcccatctgtgaaatgggggcaagaattccggccacccgaggttatcctgaaatcacatttacctatggtgaggttacctatcccaccaagtgccccagtaactcgtggctgagagtgaaccagcccggggagggaagagtctcagggcctggtgcagggcaccccctggggaagcacggtgcccaccccccgtcccacaccaacctcgtttctgtcagtggctgccagggctctgcagagccagaacccatttcaggccagaatggtaacatttcccaagaaggagaaaattagattgtctctggatctgcctcctccaccccctccttccgaaagctccctggtgggcactgttgctctgcagggaggctgatccagactccacagacagttctcactgagcagcagcttaggcctgcagtacgtccctgcgtgatgaccgcgtggaaagcctgtgggcaaccagctgctggaggccccctgccttccctcccgcctctggaggggacctagaggccacactcctggaggagatgggattccttgccccacagattgaggactggggaccatgccctcatcctatctctgccgctaagctgctgtgcaaacttgaacacagctgttcacctctctgggtgccacattgggatgagccctggctcctgagcgagcagccccactgctgcctggaagtgaatgacccacgaacctgaaaggctctgggagctggccaagtgctgtcatcatagcccctgcccagtgggagggaatagatggtgacccccaagggacatgcagtggcccaaggacctggacgcacctgatatgaaggagaggaggagtcaatgccacagtgaggacctgggaggcaggcagactgggccaacctcgcccagcctgagagtggcctctgtgcaggaagcttccagttttctggagtacccaggccaggggtttaggacagagtcctctcatccctgcaggactgggtgccgtgggccacattgccagaatgccacattgccagactgaatcagaggctgcagtgagaggctcccagaggtccctcctggggagtggggaatgggctctctggaacgcccacgggctctcagaagagggctccaggggctcagagtgcgggggagttgcgggcatcctcaggggtgcagtggggagaggccacaggaccacagctgtgactcaaattgtattgtttgttattttttttagatataacatacctgcaatcaagtatctccagtgtctggctgaactaattttagcccaagaatccactgtgtaaccatcacccagatcaagacatagtgtatttccagcacccagaagtttccatcgggcctctctcccatcgctgacccaagtcactctcctgtcactgccaagctgaccactattctaacttctatcaccactgattaattttacctaattttgaactgcatttaaatggtgcttttttccccagcaaaatgtttttgagattctctgtgcagatgcacttatcagtaggttttcttttctgttttatttgctaagtcatatttcattgcatggttgtacccaattggtttagcctgctaatatgcactagatggttttcctattgggggtattatgaataaagctgctgtgaactcttgtttctgtcttcggtacacatagccattattccctgggtatatacctgggagtgccgtcaatgaggcataaggtgtatatgtgttcagctttgggaggaaacgccaaacagttttccaaaatggttgtgccacttctcatttccacttggaatgtcccaggtgcttcgtgtccccaccaatacttggtattgttcgtcttttattttagctgttctgataggcaatattttactgtggccttattttgcctttccctggtgattaatgatgtggaacttttttttaactagtggttgaccatttcttcattttcttttgtgaagtgcctgttcaagtcgtctgcccattttcttatagagtcccctatcctttctttgatttataggcattctttatatattgcagataccaacttctttatcaagtatatgtattttgaacatctcccagtctacggcttgctatttctctctgttttcctccttccttccctctttcttccttccttccttcccaccctcccccctccctccctccctccctgtctctctctctctctctctttctttctttaatttcaattttcattttagatgcaaggggtaccagtacaggcttttcacttgggtatattatgcgatgctgaggtttaggggatggttgattgcatcacccaggtggtgaacaagattcccgatgagtagtttttcagcccttgcctcccaccctctcctgcccctagtagttcctagtgtctacttttgtcatctttatgtccatgcttttccctctgtttatggtgtcctttgaagaacagaagctgctagttttaaggaagttaatggatcttttcttctatggctggtgctgtctgtttcctgtttaagggaatctttatgtttcccaagatgtgacctgcaatgtattccattcagtcagcaccgactgggcaaatcacctaccaggtgtttctgggctcgtccccaaacttccatgggtgaagaagtgtgctgctctgctcacattttgctctgaggaccctgctgagtgcagagtgggaaggcgaggcacagggtgaagtcccattatgaacaagcctgcagatgtgtgggaggtgaatcaagggggtcttgacaatgcctgtctacacgaatggttttggttttgttctttgttctttttagagacagggtctcattctgttgccaaggctggcgtgcaggggtatagtcataggtccctgcagcctctaactcctgggctcaagtgatcctcctgcctcagcctcctgagtagctaggactacagccaccatgcccagctaattttattttatttttctattttttgcagagacagggcctccttatgtttccaagactagccttgaactcctggcctcaagggatcctcgtacctcagcctccagaagtactgggattatggacatggggttctaaaggttctacagcaaatgacttgacttcccagtgttctggagtgctgtgttggttctctcccatccctacttctctccactctttgggaaggaggtggaagctgagaagaggctcctagagacagcaaatgtccaggttctgtgcagagttcctgagtcagcagatgtgggttagaggcttccagctctgccactcgccaaccttcttatgcctcagtctcctcacctttaacatgaggatagtaacagggtctaccttgcagggtcactggaggaagtaaacgggacaatgcatgtgaggtgcatacagtcggtgctcaataaatggtgggcaattttatttaccagacaacaagtggaataaggtctcaggtgcccttcagttttaaatggccatctgttgtcttgataagggctcgttttttttttgtttctggttctgtttgtttgttgttttgttttgtttgagacagggtctcactctgtcacccaggctggagtgcaatggcaggattttggctcactgcaacctctgcctcctgagttcaggcaattctcccaccccaacctcccaagtagctgggagtacaggcatgggctaccacatccggctaatttttgtatttttagtggagacagggtttcaccatgttggccaggctggtttgttgtgttgtgttttgttttgttttgtttttgagagggaatcttgctctgtagcccaggctggagtacagtggtgtgatcttgactcactgcaacctctacctcccagattcacgtgattctcctgcctccgcctcccgactaggtgattacaggcatgtgccaccatgcctggctaatttttgtattcttagtagagacagggtttcaccagtgttggccaggctggtctcaaactcccaacgtcggatgatctgcctgcctcagcctcccaaagtgctgggattagaggtgtgagccactgctcctggcctgagggttcagcttttccttgcaggaggcctccaaccaagctccttgcatccatcttgcagttctgtgtgaatgtctaggaggcctgaatggtacagagcaacaagccccagcaacctcacctctgggctcctgctctagcctgctccccatggcttatcattaaagtaccaagagcagatgatggctccactcctcccactccagagctcccagctgtcaggccatcctgctcccagacagccgtttctgtcctgtccctccccaggcagtggctctgtcctcccatatacttgttctgtttcacgggtggctcctgctgcctgctggcagccatttcagccagcgagtttatccaatataataaaacagctaccaccccaaggatgtgtcagaagagcaaatgcatgtatgtcctttagatttcagagagctccttaattaattggccaaccccaagaggcggctgcccagggcctggggccatgtcagagaatcacagcccaccctgtccacagcacagagactgggctctcctggcaggggcgcttgcttgtcacagtagcattcaatcgatgtgcgtggaatgaatggattaactaacgacaagagcccagctgtcctggattcatgcattcacgcatgtattcattcagtttccactcaacaagcattacggagcactactgttttcaataaatgttgtgaccagaactgaagaattcctttagcaaaacacagaatccctcctgtagttgatagtaggggtcagtggggtgtgaagtggcagtgtttcacctgcccaagggatgcctcttctcctcttctcaacagccccatgaactaacagtccacagccatgatgagaagtttctctgttttctggtccctacacagcctgttctggcttcactgaacacattttctgaatctctactgtggacacctaaaaataacagcctagtgcatccctgagtctgaggctccatccctgttgatggcgcctcctgcttcaggcttgaaagaatggacctgtctctggagcaggtagccttgggaaggaggaaccaagcctccaggcttggcccaggagggaagacgagcaaagctccctgccccagtccctcactgtgcacaaggacccagagacaggctttctgagaagcatttttcccacggctcctgggatctcactcacatgcgctcgcgctcgctctctctctctctctctctctctctctctctctctctctccctctctctctctctctctctctctctctctctctctccccctctccccttctaaccctctggctgcctttcccagcctcagctgaagcagtgactgagtgttagacttggaacaatagcagatgctccccagctggcatgctctgttctcttgggttccatcgtcccctggctggcatttcagaatctcccaatgttagatgaccgaagatgggatatggccagatcctgtcctgggattcaaatggttctgtcagggacaatgctggtgttgaccacctcctggaatactgcaggattctttcagagcaacagccaaatgaagacagccgtgggatcaagccttctgtactaattgtgatgtcactgggaagtgggcttcccctgtggacactggattgctattggacctgagttttcaaggttctggccaacctgggcagctaaggaagctccctgacacagcaaaccatggctgcagtacacaagtgtgctacagcccaatcctggacatatggtcgttaccaaaaccccagtcatcttcttgaaggagccttagtataggaaaccagaggtgacctagaatcttctatttgatcaagggatggctcattatctgacttagcaccagggattcatgctaagatgtattgtctcttgatatcagagtcaagacccaggtaagctggcccgtgaggcgtggttcccatcgccaggagacaacagccgcgctgaccagctgctggcaatttcttcggtcaccctgcctctcaacttccaaagccccatggttttcgggtttacccacatatgacccttatgtaaatttgcttgtcccaagaacccttaactcatatcgtgtctgtttcctgtgtggttggttattgatatagtttggataaaatgccttggtctttagtatagtttggatattgtcctctccaaatctcatgttaaaataaatgtgacctccaatgttggaggtgaggcctggtaggaggcatttggattattggggcagatccctcatgaatggcttggtgccctcctcgtggtcatgagtgacttctcgctctattagttcaggagtttaaaggagactggcacctccttctccctctctcgtcacatgatgtgcctgctccccctccactttccaccaagattagaaacttcctgaggcctctccagaagaagatgctggtgcctgcagaaccatacgccaaataatcctctttttaaaaataaattgcccagcctcagggattcctttatagcaatgccaaatggactaatacagtcactactatgtgcgttcataggcagaaggcattgcagggcaatgaacagagccattggttaaagatttgccaacacttcccagcacatgcttcctttaaacatctcgtgttgccaactaatgagaagaaatggtatccacaaataataccagcagtccgcacacctgaggagtaagtacttattcagaaagctttgctccaatgacagtgggaggaaaattggccaaagcaacagggactcccccaggtacagtgtgaagagcaagtttctccccagatatcctcagcaagaagatggcaggatccacagagagacaatgtccccttttgggcaaacaagagggaaggtgtgatcatcacgctgtgatctgaaaaccccacggtaagcacagtggaagtaatgacaccaaccactggcctttactgtgcactttgtctgtgtcgggcatgagactgagaattttgcctttattattctagttaatccttccatttacactgtgagactgttgctaccacttcctctattttacagtggaggaaattgagtctcagaaaggttaaggaatttgctcaaagttgcagaactagtaagtagcagaaggcagtttacacccaggtctgtctacttttacaatttatttggcccagtgtcctgcctgtgccaccctctgccatgtgcccccttgtccagaggccctggagctcaggtcaggggctcattcaagcctgccgcgtggggctgggccagaacatccctcagcaaagccatctttacacaagctcaaagaggccccgacccagatcttgagcggatctgggatctccgtgtccccatggctttcctgacatcttgaggtttcagtatctggacatgagcaaaagtgtcatctctctacctgcctaaagggaaagtctccattcaactgaagaatcttctcttctctcttcacttgattataaagaacacacttctgttaacttcaatatttgccttagccccacactctatttaaaagccaaacatggtgccgggtgcagtggctcatgcctataatcccagcacttcaggaggccaaggcaggaggatcacttgagaccaggagcccaagaccagcctgagcaacacggcgagaccccatctctacaaaaaattatttaaaattgaccaggctcggtggcacatgcctgtagttccagctactggggaggctgaggtgtgagggctcacttgagcccgggaattggaggctgcattgagctatgattgccccactgcactctagcctgggcaacagagcaagactctatctctaaaaaccaaagacgaaattgtgtttccagttctcctccaaggccatccaggccacacactggaccccaacagccttcctcccaatctctctctcaacacaggactgcaggttttggatttctagttgtggcacaagcattactctggccaaccctaaaataaggcccagcactgccttccctccatgaacacaggctgggtcccccagttgagagtctaccataatcaatctgtctacatgggaccgtcaggagagccgccaagagatcagaggtgtggaggcaaggacttagcctgcagggcccagctctatgactttgaggaaagctcccattactgcagacctgggtttattctgtaaaatgggggtgcttccagcctgccccagcgcccccaggcagtgagtcagggtgcttggcaagtgtttcactttgcagaaaatggtctcctctcctgtgggtgagaagtcccaccactgtgccaggcattccatcagcagcagttccaggaaaaccttcatgagtctcgttggaaaaattatgtatattagttacataggccccccctaattcaggtctgagagcgctctgtgggacttcagtcaatattggctgaaaatcaaatacagaccttgttatgattccatgcaaacactgcactgaattccaccaaagcatgctccaggcttgagagagaacattacattaacttgcacaactgtccatggggcaaaacacatgtcctgacccctctgccaattacaaggatgcgggctccacccaggcattctcataaattcaaggactccactatcgaggcagcaaatcagcaccaacacacttgaaaacaagcgggcatagatagagactgagaactgatgtaactgacttgattgagaatggacgcccaatattcaagtgaatgagtaagtgaatgagtgagtgagtgagtatgtgagtgaatggagagacagctaagtggaataaagaacatcagatatggagtcacaaaatctgaggtctaatcttgctctttcattcactgtaattttctagcttaccttctaagcctctgttttttcatctataaaataaagtgaagattatatatagtaaagattaagtgaaatgatccttgtaaagtgcttagcacagtgactggcatataggctctcaaaaaattataataaacaaccactcaataataatgacaaagccacataccaaaatgcacaattgagatttaggtaccttagaagcattggctacttttaaatgtagatatagaaaaagactgacccactcaggattgggttatatgtttctgtttggaggcatccctgcttcaaactcatgccagtatgaaaagcaaaatgtaattcaagaagttgtaaaatacatagccatcttcaaaaacaaacactgcaagaataagatatgatttgaaaacaaaaagtggcagaactccagtggctgaatccctgaagttcctattgtgaggagtggtgggactacgagtaacctctgggaggcaagggcataactgaaagccactgtgtgagcccaccggctgaagctgtcccctgaacatgggaaaggtagctgggaaaaagtatgacggactgtgagcgggtgaaaggggatgcactagatgattgccacatctaggatctgagcgatatcaaagaagtagaaagtctgatatctgtggaattcgttgggtgctgctaaatgttattgatacattgaagattaaaattacagactcaagtcagtcaattaccaatttaaggcatggatgataggcaaaaggcctccatgacaatgcttaaataaatcatccttcccatggtcagatagcagaccatccagaagatggaacctagaatctgagtgaaagagagcaacgcttcagagagaagtggggtcccatatgccaaaattaaggtcttgacaggacagaattgggaccctgaaatggggtagagacatctgggtggagagttgaaaacactaaacctccagattccctggaactctctctacctgcagaagtggtgggctattcctttgcgggagacagcaaatgcccttgcttgaaatctactcagaggcctcagtggtgacaatctcttgtaagactgtctttcctcctcaagatcttccttcaccatactctaccctcacccccactggccacaagaacaataaccagggtggagtctcagtaaggtctaactaggaaatactggccctcctaaagtaaaagaagggcgattgaacaaaaatgtctggccagtaatcaacacatcaaaaaatagatgttggcatggacgtggtgaacagggaacacttctacactactataaactagtacaaccactatggtgggaatgtaaactagtacaaccactatggaaaacagtatggagattccttaaaggactaaagtagaaccaccattttatccagcaattccactactgggaatatacccagaggaaaagaagtcattatgtgaaaaagataacttgcacatgcatgtttatagcagcacaatttgcaattgcaaaattgtgggaccagcccaaatgcccatcatggataaagaaactgtggtatagctatacaatggaatactactcagccataagaaggaatgaattaatggcattcgcagcaacctgaatgagattggagactattattctaagtgaagtacctcaggaatggaaaaccaaacatcgtatgttctcactcataagtggaagctaaactatgaggatgccaaggcattaagaatgacacaatggactttggggactcaaggggaaagggtgggaagaggtgagagataaaagactacaaattgggtgcagtgtatactgctcgggtgatgagtgcaccaaaatctcacaaatcaccactaaacagcttaactaacgtaatcaaacaccacctgtttcccaataacctatggacattaaaaattttaaaatttaaaaaatttttaaaaatacctggctgatatgaacccataggaatcaagagagcttgcctggaagtgggtcttaaggccactgaaccaagagtgggtatgaaaaagggcacagaatttgaggctggatgagaaattcaacacttggtcaaggtcctgggagtcagtcctagcaatttctgaatggttcttagtctcttgaagaaaaataccttaccataaataaaatgtggaggggatgtgaagaaagccttgctggagtgtcaggtaaggggttcagttcttgtgatcccagagaagtggccatgttaccatggatctgttacataagatctgagttctcatcatatgtttcctgagagaattcagaggaaacttccctcactgaggaggtgggaaggaactggggaaggaagaaagatggaaagaggggagactgaggaggcatcttaagctcagtagtatctatctgctctaagctatgctgataataggaagtcttgtcatggagtggagctttctagaatcaccaaggacaaaagggttctggaactgtggaggccatatagcagcacttaatcattagaggcaaggtagacactgaggtcaggatggcaaccaggggaatgttacctacagggatgtgtgatgaccatggtgtacttagtgactccatgtggctgacaaaggtattgatcaagaatggataaaaatgagcaaagaaaggagattaaacgtaccagtgggcagtaagttacatgtcagtcagttctcagacacaggacccatcaattgaaggagaggctctcttgagaaaagacactgcgatgccacaggaggtataaacaacagcagttacccctgttacaagtaattgtgccttggaaaagggaagaagtttatatcttcagtgtgctgttggatacagcatcagagctaacattcatacctgaaggctcaaaacacaaatgccctccaccccgcattaaggtgaaggtatgtgagtgcaagcagtgaatgcagtccagtctttctctcagtgggtcccgcaggtccacagacccaccaagtgggcatttcctccattccggaacacatcaccaggatggacatacctagcagctaacatagtaggaaaggccgaacgccagctcctgaaattgccccctgacccaagcaatcaaaactaataccacgggccaggcgcgggggctcacgcctgtaatcccaacactttgggaggccgaggcgggcgaatgacctgaggtcaggagttcgagaccagcatggccaacatggcgaaaccccgtctctactaaaagtaccaaaattagcagggtgtggtggcaggagcctataatcccagctactcaggaggctgaggcaggagaatcgcttgaacttgggaggcggaagttgcagtgagctgagatcataccattgcactccagcctgggtgacaagagcaagacttcatccaaaaaaacaaaaaaaactaataccacatctgggagtagaggtagaaatgagtgttattctcaaagacttaaaggacagattggcatggaattcccttatgtcctcccacttaattcataagtctggaacttgcaaaatccacatgaatcatggtggatgaggatggaccactcagacttaaccaagtgtaaccccagtcacagctactttgccagatatggtgtgtttacctagaacagatcaacacagcttctgctatgtagtaatgcagctattgatctactggacttgtttgaatcttcatcaaggagcataagaggcagtttcactcacacaggatgggtgagaatatacatccatagtcttctcctgtggctatgccagctctccttctatctgtcacagtacagcctaaggtgaccttgaacatctggacatttcacagaaaatcacatttctccacaatagtcttgcagaggttggaagacaaactctgcagggtccagattaagagaaggctctgcagcaggtccagaatatagtgcaagcagagctgacacttgggtcatacgattcagcagatcctatggtactagaaatatctgtggtagataaaggtgcagggtcaggtctctggaaagccccaacaggagagttatagtacagattcctgtggctttggagaaagccatgttgtctgctgcagtcaaatataccttatgcaaaaatctgctcccaaaatataaaagccacataaaacctgagcccctgaccatggaacatcaagtgactgcaaccagagctcttgtaccaagctgggtgctctttgaaccaacaagtcatgtattgggtggattaagcagtaattcatgtgtgggagttatacatccaggagcaagcacaagcaggttcaaaaacacaagcaagcaatacaaactgctggcccagaccctcatgtcacccacctatgtcatgccaatgcatctccctcagctcaccgtatggcctctttggggtgggagggggtgatctctacaaccagctgacaacggaggcaaaaaccaggatgagtctgccctgcatggcaatgcaagatgaaagtgaacttctactgcactgcagctgcactcaggggtggccctgagagtccaggcagtcatccactctccatctctcaattgcatggagagagaaatggcccgaaatacatatattcccaagcagtgtgaattatctgttttctgactgactagacagactctcaaaagagcaagattgaaagattgagaacaggctgggcacggtggctcacgcctgtaatcccagcactttgggagaccaaagcaggtggatcatgaggtcaagagatcgagaccatcctggccaacatggtgaaaccccatctctactaaaaatacaaaaaattagccaggcgtggtagcaggtgcctatagtcccagctactcgggaggctgaggcaggagaatggcgtgaacccgggaggtggagcttgcagtgagccaaggtcgcgccactgcactccagcctgggcaacagagcgagactccatctcaaaaaaaaaaaaagaaagaaagaaaagaaaagaaagaaagattgagaacaaggagattttggcaagcgtcatgtggctagaactatgcaagtcaagtgtgtggattttgggatcacacatcaatgcccaccacaagcagccacttcaagggaggcattagacaaccaggtacatgggagctcttactcagaggtgtccagcagcaccatcagccaccccgaatctgcccagtaaataaatgctcagccagtcagcagaaaccttcgatacagtgtcaccctccaggaaactaccaagacaagttaatgttgtgtcaagttaattatatacaacttcttctaccctggaaaaagtgattcatcctgaaaggaactaaaacatagttccagaatcgctttgccttttttgctcataatgtctcagccaggaccactatccaaggggcaagtacatgattggtcattggattgcacatggtatcaacttgcaccaaaagacccactttatgacaaaggaaaacacatcctatcacctagaagctgccagcctgaggtgttcacttggagataaccccaaaaaatctaggatacagtccctgagatgcagaatatatcttgactcaaaggccatcatgtgtcttcaatagagaagaggtgtggattcaggaaccaaggggtgacagtgggcataccctgctgtacctcactcccagtgaccttccatttaccccctcccaactttagaggtcttgtttccctgaagatgaagtttccacccggagacattgtaaaagtcccactaaatgtgaaagtacagctgtcacccggtcatttggggctcccataccagtaggtcagcaggaaaagaaaggatttcccatactggcaggattgtcaggaggagatagggttcatgatacagagtgggaacaggaaaaagtaaatttgggacataggaatccactgagacatctgttggtgcccacatacagtgattatggatggcaattataccaatatagcctgaaagaatacgttcagacaccacaggagataaaggtcaagtctaggcaagccactgagaccaggagaagagaatctacagtgggtggctgaggagggagctgctgagtatccagtacagcctcaaaaccaactgttgtagtgaagatcatagtttgtctgacttgtcctcttcttttaagtatttttttcccagaaatttgaagccatcactcccttaccaaattcataacagaatggagtgatgtagaaggatttgaaaggttggatcatgcagtcctttacccaaactcctttttaccatgtttgggcacccatcctctatctcctagacctgaatctgcacaatgctgaagcatacttccactgcagaactccctgtggaatcaggctgaggccaccctctgtgggactctgcctgagatcacatcttgctggcttcctcccttccctgccccacctccctagcacgctccctaggagcattaccataataaactacttgcacattatcttaatccatttcatgctgctataacagaataccataaactgggtagcttataaacaactgaaacttatttctcatgattttagtgactgtgaagtccaatggcacagcactgacatctggtgagggcctttgtgttgggccataacatggtacagggcatcatattggtgagagagagtgcaagaaggagctgaatttgtttttataaaaattctttctcagtaaggtactcactcctctgataacaacgttagtctattcatgaaggcagagccctcatgacctaatcatttcataccatcccacctctccatactgttacactggggattaagtttttaacatatgaactctaggagacacattcaaaccgtaacacacaaacctcatttcagatgctttttctgtagacctgagctaagaaggcattttatatgctttggctctgtgtccccactcaaatctcatgtcaaattgtaatccccagtgttggaggagggacctggagggaggtgactggatcatggaagcagatttcccccttgcttttctcatgatagtgagtgagttctcagaagagctggttgtttgaaactgtgtagcacttccccctttattttctctctgtctcctgccagccatgtgaataagtgcctgcttcccctttgcctttctccatgattggaagtttcctgaggcctcctcagaagcagaagcctgtacagcctgcagaactttgtgccaattaaaccttttttctttataaattacccagtctcgcatatgtctttataacagcatgagaacaaactaatactacatcattactttttgtttgtttgttttctcaccctaacggagtggaaaatgttttcgaggagatgtaggggactgggagagtgaacaacagggctgagcctcccatgtatcagaatgaaggcccaaggacacctactgaatggggaaatgttccaaagcctagggcatcctccacataaatggtatcgtctgacaaagcctgcataccacccagaggcactcttactctgccttttccaccatctcaaacagtgaatagaaagaaactatgcagccattacactgtagctaagagggaggaccaggaggtctcaggtacaatattcgaagcaaagaggatgcctagacagagttggcactcatgaactagatgaaatgtctcagcgtggaagccatgtgagcacaaaagacaaagaagagagataggaacgcagcagtcaaggagtccaacctatacaaaaacattactcagggaacagaagaaaattacccacaactgattaaaattagggaaaaatttaatagaaacatgaattcaacaaaattaaaattcaaagatgagatgataaagctacagaacaatatggaaaaagagattagaaacttgggaaacaaaattaaatcccaaatagcattactacagagaaacagaataggcatgactgataatctaattactgacatagagaaaatgatataatatgtaactgacataataaaaatgagtgcatataaaaaagaaattaggggaggagccaagatggccgaataggaacagctccggtctacagctcccagcgtgagcgacgcagaagacgggtgatttctgcatttccatctgaggtacctggttcatctcactagggagtgccagacagtgggcgcaggccagtgtgtgcgcgcaccgtgcgcgagccgaagcagggcgaggcattgcctcacctgggaagcgcaaggggtcagggagttccctttccgagtcaaagaaaggggtgatggacgcacctggaaaatcgggtcactcccacccgaatattgcgcttttcagaccggcttaaaaaatggcgcaccacgagactatatcccacacctggctcagagggtcctacacccacggaatctcgctgattgctagcacagcagtctgagatcaaactgcaaggcggcaacgaggctgggggaggggcgcccgccattgcccaggcttgcttaggtaaacaaagcagccaggaagctccaactgggtggagcccaccacagctcaaggaggcctgcctgcctctgtaggctccacctctgggggcagggcacagtcaaacaaaaagacagcagtaacctctgcagacttaagtgtccctgtctgacagctttgaagagagcagtggttctcccagcacgcagctggagatctgagaacgggcagactgcctcctcaagtgggtccctgacccctgacccccgagcagcctaactgggaggcaccccccagcaggggcacactgacacctcacacggcagggtattccaacagacctgcagctgagggtcctgtctgttagaaggaaaactaacaaccagaaaggacatctacaccgaaaacctatctgtacatcaccatcatcaaagaccaaaagtagataaaaccacaaagatggggaaaaaacagaacagaaaaactggaaactctaaaacgcagagcgcctctcctcctccaaaggaacgcagttcctcaccagcaatggaacaaagctggatggagaatgattttgacgagctgagagaagaaggcttcagatgatcaaattactctgagctacgggaggacattcaaaccaaaggcaaagaagttgaaaactttgaaaaaaatttagaagaatgtataactagaataaccaatacagagaagtgcttaaaggagctgatggagctgaaaaccaaggctcgagaactacgtgaagaatgcagaagccttaggagccgatgcgatcaactggaagaaagggtatcagcaatggaagatgaaatgaatgaaatgaagcgagaagggaagtttagagaaaaaagaataaaaagaaatgagcaaagcctccaagaaatatgggactatgtgaaaagaccaaatctacgtctgattggtgtacctgaaagtgatgtggagaatggaaccaagttggaaaacactctgcaggatattatccaggagaacttccccaatctagcaaggcaggccaacattcagattcaggaaatacagagaacgccacaaagatactccttgagaagagcaactccaagacacataattgtcagattcaccaaagttgaaatgaaggaaaaaatgttaagggcagccagagagaaaggtcgggttaccctcaaaggaaagcccatcagactaacagcggatctctcagcagaaaccctacaagccagaagagagtgggggccaatattcaacattcttaaagaaaagaattttcaacccagaatttcatatccagccaaactaagcttcataagtgaaggagaaataaaatactttatagacaagcaaatgctgagagattttgtcaccaccaggcctgccctaaaagagctcctgaaggaagcgctaaacatggaaaggaacaaccagtaccagccactgcaaaatcatgccaaaatgtaaagaccatcgagactaggaagaaactgcatcaactaatgagcaaaatcaccagctaacatcataatgacaggatcaaattcacacataacaatattaactttaaatataaatggactaaattctgcaattaaaagacacagactggcaagttggataaagagtcaagacccatcagtgtgctgtattcaggaaacccatctcacgtgcagagacacacataggctcaaaataaaaggatggaggaagatctaccaagccaatggaaaacaaaaaaaggcaggggttgcaatcctagtctctgataaaacagactttaaaccaacaaagatcaaaagagacaaagaaggccattacataatggtaaagggatcaattcaacaagaggagctaactatcctaaatatttatgcacccaatacaggagcacccagattcataaagcaagtcctgagtgacctacaaagagacttagactcccacacattaataatgggagactttaacaccccactgtcaacattagacagatcaacgagacagaaagtcaacaaggatacccaggaattgaactcagctctgcaccaagcggacctaatagacatctacagaactctccaccccaaatcaacagaatatacatttttttcagcaccacaccacacctattccaaaactgaccacatagttggaagtaaagctctcctcagcaaatgtaaaagaacagaaattataacaaactatctctcagaccacagtgcaatcaaactagaactcaggattaagaatctcactaaaagccgctcaactacatggaaactgaacaacctgctcctgaatgactactgggtacataacgaaatgaaggcagaaataaagatgttctttgaaaccaacgagaacaaagacaccacataccagaatctctgggacgcattcaaagcagtgtgtagagggaaatttatagcactaaatgcctacaagagaaagcaggaaagatccaaaattgacaccctaacatcacaattaaaagaactagaaaagcaagagcaaacacattcaaaagctagcagaaggcaagaaataactaaaatcagagcagaactgaaggaaatagagacacaaaaaacccttcaaaaaatcaatgaatccaggagctggttttttgaaaggatcaacaaaattgatagaccgctagcaagactaatgaagaaaaaaagagagaagaatcaaatagacacaataaaaaatgataaaggggatatcaccaccaatcccacagaaatacaaactaccatcagagaatactacaaacacctctatgcaaataaactagcaaatctagaagaaatggatacattcctcgacacatacactctcccaagactaaaccaggaagaagttgaatctctgaatagaccaataacaggatctgaaattgtggcaataatcaatagtttaccaaccaaaaagagtccaggaccagatggattcacagccgaattctaccagaggtacaaggaggaactggtaccattccttctgaaattctattggaaaatcaatagaaaaagagggaatcctccctaactcattttatgaggccagcatcattctgataccaaagccgggcagagacacaaccaaaaaagagaattttagaccaatatccttgatgaacattgatgcaaaaatcctcaataaaatactggcaaaccgaatccagcagcacatcaaaaagcttatccgccatgatcaagtgggcttcatccctgggatgcaaggctggttcaatatacgcaaatcaataaatgtaatccagcatataaacagagccaaagacaaaaaccacatgattatctcaatagatgcagaaaaagcctttgacaaaattcaacaacccttcatgctaaaaactctcaataaattaggtattgatgggacgtatttcaaaataataagagctatctatgacaaacccacagccaatatcatactgaatgggcaaaaactggaagcattccctttgaaaactggcacaagacagggatgtcctctctcaccgctcctattcaacatagtgttggaagttctggccagggcaatcaggcaggagaaggaaataaagggtattcaattaggaaaagaggaagtcaaattgtccctgtttgcagacgacatgattgtttatctagaaaaccccattgtctcagcccaaaatctccttaagctgataagcaacttcagcaaagtctcaggatacaaaatcaatgtacaaaaatcacaagcattcttatacaccaacaacagacaaacagagagccaaatcataagtgaactcccattcacaattgcttcaaagagaataaaatacctaggaatccaacttacaagggatgtgaaggacctcttcaaggagaactacaaaccactgctcaaggaaataaaagaggacacaaacaaatggaagaacattccatgctcatgggtaggaagaatcaatatcgtgaaaatggccatactgcccaaggtaatttacagattcaatgccatccccatcaagctaccaatgactttcttcacagaattggaaaaaactactttaaagttcatatggaaccaaaaaagagcccgcatcgccaagtcaatcctaagccaaaagaacaaagctggaggcatcacactacctgacttcaaactatactacaaggctacagtaaccaaaacagcatggtactggtaccaaaacagagatatagatcaatggaacagaacagagccctcagaaataatgccgcatatctacaactatctgatctttgacaaacctgagaaaaacaagcaatggggaaaggattccctatttaataaatggtgctgggaaaactggctagccatatgtagaaagctgaaactggatcccttccttacaccttatacaaaaatcaattcaagatggattaaagatttaaacgttagacctaaaaccataaaaaccctagaagaaaacctaggcattaccattcaggacataggcgtgggcaaggacttcatgtccaaaacaccaaaagcaatggcaacaaaagccaaaattgacaaatgggatctaattaaactaaagagcttctgcacagcaaaagaaactaccatcagagtgaacaggcaacctacaacatgggagaaaattttcgcaacctactcatctgacaaagggctaatatccagaatctacaatgaactcaaacaaatttacaagaaaaaaacaaacaaccccatcaaaaagtgggtgaaggacatgaacagacacttctcaaaagaagacatttatgcagccaaaaaacacatgaaaaaatgctcatcatcactggccatcagagaaatgcaaatcaaaaccactatgagatatcatctcacaccagttagaatggcaatcattaaaaagtcaggaaacaacaggtgctggagaggatgtggagaaataggaacacttttacactgttggtgggactgtaaactagttcaaccattgtggaagtcagtgtggcgattcctcagggatctagaactagaaataccatttgacccagccattccattactgggtatatacccaaatgactataaatcatgctgctataaagacacatgcacacgtatgtttattgcggcattattcacaatagcagacttggaaccaacccaaatgtccaacaatgatagactggattaagaaaatgtggcacatatacaccatggaatactatgcagccataaaaaatgatgagttcatgtcctttgtagggacatggatgaaattggaaaccatcattctcagtaaactatcgcaagaacaaaaaaccaaacaccgcatattctcactcataggtgggaattgaacaatgagatcacatggacacaggaaggggaatatcacactctggggactgtggtggggtcgggggaggggggagggatagcaaaaaaaaaaaaaagtgtatttttatggaatacataaaaggtaactcttgtgagttatgactttgaaaaaaaaaaaaaagaaattaaaatcatttgagaaccactgactgtaaaaaaaaaagacagacagtttatcttaagaataactggtgttcctaaagaaaaaaatccaacaagtagaacaaaatatgtattcaaagatataatacaagaaattttccctgtattgaaaaaaataaatgaacatgctaaaaacaaaacaaaataaacaaaatagcacaatgtgttttagcaacatttgatacagaaattccaacacaaagacacagcccatccaattaagttattaaacttcaaagttaagagagaaatttttacatatctaagcagaaagagaaaaatcacacacaatgggaaaatcaggcaagacactgacttctctacagcaacactcagagcccgacaaaaaggtattaatgtctgtgtttggagggaaagaaaaggcagcaaagaatattacacccagccaaagttattcatgtataaaggcaagaagcatccattctgaaatgttaaatacttcaggaaatgtagaacacagaagcctttttcaagaaaataaaatgaactattcacaattaaatccaagcaattaacagattagaaatacgtaaaaataaacataggaattgagacattggggtagaagaaggaggaatgagcagagagttcacttaaatatagataaacattaagtaactcagggaattatgatgacagaacaaagtgtgaaattaattaagctggacaaggtaaaagtaaaaaagctaacaactcttgggagataggatggtaaaatgacggggaggtgagtaaatcaacatctcatctttcaaagaaaggagccaatagactaaatttgaaacttttgagaaaactcgaaacttgaaatgaatttttttttaaaaaaatgactataaactcctgatgtgtttcacaatctctcttttttgtttttaagggattttctgggaaataaattttacataaaaaaatatgtatttgaagttcacagttccctcagtttcacttcacttacattttcttctattaagtaaaattaaatactttatattttgaaataacatctagagatggtcattttttataaagataagtatttgtccaggtatccatgttactttctatcagcatacataggtgtctggaattatgtttgcctaagttagtgagatttagggttttttaaaagattttcttcactgtacatttttgcctcatttaacgtctttatgatatgcatgattcatttttataaaagcaatagaatgatttccttaaggcaattatgccaagatattaattatagtgattaatttctggtagtaagaatactgatgggttttttttgtttggtttggtttttcataatgcaacttaaacttcaaaaaatatagttaggaaaaataaggatggataatcatgaaaaaatagaagtaaaatctgtaatttctaaatcaggagaggaaagtgatgaaagctttagtaattaaatgtaaatgaggaaaagagttgaagagaagaaaataaaatggtaaagaaaacatatatcagaccctgttgaaaacaaacaaaaaaagaaaacataaaataagcagtaaaaataagttcaaatagatcatgtcagcacttgtaataaatataaacaggtttaagttataaattaaaggacagagtctaacaaattggatttttcttaatctagtgatattttgcttataagagacacacgaaaataaatgacccaggaaggtcaaaaatagaggaatggaaagaatatcgctggcacaacaacaacaaagcagaatagcaatattagtagcagataaaatctaacttaaggcaaaaagcatttatggagataaagaactccatgtaattataaaaggaaaggactcaccaaggagatataacagtcatgaattttatgtacctcacagcaacatagcctcaaaaatgtgtaaagcaaaactgacagaattttaagaagaaactgataaatctataatcagagtgggagattctggctcactgtattggaaattgctccagcagacaaaaattacttataacatagaaaacttgtacaacatcgtagcaagcttggtctaatagatatacaaagaatccgtcaacaaatacaaagtgtgcattattttcaagaagataaggaatacttacaaataacaaatcttgcaacaaaagtctcaacaaatttcagaaaatcaaatatcaacaaatattattctcagaccccaatgcaattaactcagaaattgacaattaaaagacaaaaatatagaatattttaaaattacactcctaaattacttgtgtgttaaaagtgcaaattaccgaaacattaaaatatcaggggctaaaggaaaacagggttctacaaaacataagttgtggaataaattcaatactgttcttgataaattcatttacataaaaagagtgaaaataaatgttatacaactcaagaagaagattaaactcaaaaaaggaaaaggaagaaaatgatcgtagttaaggactagaatgtaagtagtttattaaggaagtactcccagaagaaacaagtaaggaagtgggaaaacacagtaaatacagagaagatttgttctgtcttacggcaaaagagttgagatatactgtatctagccagttactggctacaggatgtctgaggtgggaagcatgtaagcctcaggcacctttagctctccataccagcaggtggctccagtgcccaacagcagtcctttgaagattgcaagtgcaaatttttaagagcaaaatacacggaagctttgggagatgagcttactgagctggtaaatagaatgcacaggcatttagtaagggcatccagggaggctactacagaattttacagaggaggaaaacaagtaccaccaccaaaggaaatgttcaatacaaccagaaatcactcattttaaaagaacgaagtagatagatctctagaaaaacagatgaagaacagcaaaactgcatttttcaaaaggcaatatgtaagcagccaacattgactacgcctagtacgacatatctctcccacccattacaactaaaaattctagacaaaatacaaaaagcaactacctgggggttttgaaaagttaacaattccagagcaaccactaagaaaagtgccagtagattaatttaaaagaaatttaagaaaaaaaaagaaggcagaaaagaaaagaaaaacaaaagtagagaggacaacaaacaacaataaaacgtagacctaaatccaaacatatcaattattgtgttaaacgtaaatgacttaaacatcaagtaaaagacagagattatctatttggattttctaaagacccacatatctgctatacaaatacttaaggaagaaacagtaacaactctattcaatttatttcagaatatagaaaaggaatgaatacttcccaactcattttgtaagagatgtattaccttgatttcaaaatccaacgaagacattacaaggatttttagaagttaaaaactacagatcaatatttctcatgagtgtagatgcaaaattatcaccaaaatattaacaaattctaataatattataaagataatacaccacgatcacatgaggtttactctgaggatgcaaggttagtttaaccttgcaatcaatgtatcgtattagcagactaaagaagaaaaaccatgtgattatcttaatagatgcagaaaaagcacttaacaaaagtttaccaccatgactttttttaatactcagcaacctaggaatttaagagaactttctaaacctgattagggccatccacaaaagaaacctacagctaacatcaaatttaatagtgaaagatggaatgcttctcccctaaaatgagaaacaaggcaaagatatctaccttcatctctcttatgcagcatcatactggaagtcccagctagtttgacaaggcaagaaagggaaataaaaagcatacagattgcaaaagaagaaataaatatccctttattttcagataacatgatgttaaattaaatacattaaatacaagatcaataaacaacaaatcaattgtatttctatatactagcaatgaaaaacatttaaaatatgttttaccatttactgaaacaggaaacacatagatataaatctaacaaaatatatgcaagacctgtaggctgaaaactatgaaacactcataaaagaaaacattcttttcttttctaaataaatggagtgacaaatgtatgtccagaggttggaaattcagtattgctctcaattctccctaaaatggtctacaaattcaatgcaatctcaatcaaaatcttagcagaaattgttgcagatactgacagggtgtgtctaaaatttattgggaaaggcaaaggaaatagagtaaccaaaaaaattttgaaaaataaaagtaaagttggaggactcccactacctgattttaatgcttatcataaagctacagtaaccaagagagtgtgatactcgtggcaagatagacatatagatctatggaaaataaagaaactccagaaatagacacagacaaaggtggccaactgatttttgacaaaagtgcaaaggcaagtcaactgagaaaaacataatgccttcaacaaatggtgattaaacaattaggcagacaaaaacaaactctactgacccatccacacctcacaccttatgaaaatattaaaacgtagtataggaataaatgttaaattacaacacttctagaaaaaaaggaaatctttatgactttgggttagaaaaaaattcttagatacatcgcaaaaatatgatcaacaatagaaaaaaaatgaatttgatccaaatcaaaaactgctctgtgaaagacactactaataaaatgaaatgagaagccacagactgggagaaaatatttgcaaatcatttatctgacaagaaaaacttctattcagactatatcttaaaatctaaaaactcaacaacaggaaaacaaacaacccaatacaaagtgggcaaaatatttcaaaaggcactttgacaaagatgatacacacagagcaaataaacacttaaaggttttctacaccattaatcattagaggaaacacaaattaaaaaccacagtgacctgctaaaaagactaacctgtgcctattaaaacaactgaaaaaaataagtaaaacctgatcattttaactgctgcctaggatgcagagccacaaaaactttccaacaatcgctgatgggactgcaaaaggtagagacactatggaaaacagggtagcagtttctcataaaggtaaacatgcatttaccatataatccagcaatcctaagcttaggtatttaactaatacaaatgaaaacttatgttcacgtcaaatcctgtacataaatgtttatatagcaactctattcgtaataatcaaaaaactacaaacaaggtgaatatcttcaactggtgaatggataaacaaattgtggtctacacatacagtggatactatccaacaatagaaaaagaacaaaatattaaaaatacaacatggatgaatgtcaaatgcgttacactggtatagcagtaggtagtatggtatgtagcttttgagtctagctatataatcctatttgtatgtcattttggaaaaggcaaaattataaagatgcttgccagaggttgggggtagtaaaggtagttgacaacgataaggcaatatgagggaacttgggggaaaacactgaaacagacttggtgtgctggtggttacatttgtcagaactagtagaactatagaccaaaaaggataaattcaactgtatataaattaaaaataaataaaaacgatttgaaaaaaatactgagaatgaaagagagacagcatgacagattcagaagagatattttttaaccataagaaaaaacatgaatcactttatgccagaaagttagaaaatataattgatgtagacaatttttggtaaaaaatataaattatctaatattgtgactcaaaaaaaatgagaaatttgaatgaacaaagaacgattaaataaattatatatgttgccagccgaaaatctatttcttagatagacagcaagcccaataactttataggcaaatatttcctagattctaaacatactaccacatcatactaaaaatattttttaaaacacaatttcagaggacagaaaaaggaaaactatccaaatcatgttatggggctactataacctcattaccaaaaccagataaagactactagaaaacaaatacagacttgtttgcacacatgtatatgtgtgtatatatatatatgtgtatgcgtgtgtgtattttatatatacatatatattataaatacatagaaaaataaagttcatcaagaatcctaaaatcaagatcagcacataaaatcagtaactcttctagaatccaacaatgaaccattaaaaatgttattttttaaagagtcattcatagcagctgtaaaagctagcaagaaatataatgaagctatttaatgtacttatgaaaatattacatactataaaaacaccaacatgaataccaatatgtactatgttcatggatgagaagacattatcataagcacatctaattttcttatattgaactataaaataagaacaatctcccttagaatgttaacacttttttgtaatgaagcttagcaatctgatcctaaattcgtgctgagtgacaggaaggacagacaagacaatttttaaaagaaagtgtaaacaatgtaaagaggatgtaaccagtaataagatttgctatagagttggcatcactgaaacaatgtggcattatacaggaacagacaaatagattagcggaacaaggagaaagcgctgaaacagactcaagtaaatataaaaacttgatagataacagaaaagaaattaaaaattagtaaagaaaagtgaactcaatacatggtgctgggacaatgatacatctatctatacatacatagatgtacatgtatatgtatatccatgttaaatatatatatatccttgtgtatagatataaaaatatttaatgtttatatagaatatattgataaatatacagtatatatagtcctacatttcactatttacaaaaaagcattctaggaattttaacattttgaatgtaaaaatgtaatctagagaatttctgttttccctctgtatttagtaacacgtaactgacaaataaaattgtatatatttaaggtgtacaatgtgataccttgattatatataatatataaaatatatataatatatataataaaatatatattatatataataaaatatatatattatatatatattttatatataatatatattatatataatatatataaaatatatatttaatatatattttatatataatatatttaaaatatatattatatataatatattatatataatatatttaaaatatatattatatataatatattatatataatatatttaaaatatatattatatataatatattatatatatatatatcttgtgaaatgattaccacaatcaatttagtaacacatccatcacctcacatagttacctttgctgtggtgagaatattcaagatctattctctgagtaaatttcaagtatacgatacagtattactaaatatattcaccacactgttcacctagaacttattcctcttgtaactgaaagtttgtaccctttaaccaacatctctccttctttccctcccccggcccctgcaaccccactccacctttatttccatgaacttgtctttttgagattccatatataagtgagatgagatagtatttgtctttttctgtcagacttattttgcttagcaagatttcatcaagtttcatccatgttgtcacaagtgacgggatttccttctttttatggctgaataatattcctttgtgtatatacaccatatctttcaacatatgattcatctattcatccttcaacacttatgttgtgacaaaagccatagcttgactattgtgtataatgctgcagtgaacacgggagtacaggtgtctcatcaacatactgatgtcatttcctttgaatatatacccagaggtggggtcactggatcatacaccagttctatttttaatgttttgaggaaactccctactgttttccataatagctgtgccatttatgttcacaccagcagtgcacaagggttctcttttctccacatctcaccaacatttgtcatcgcttgtctttttgataatagacaaggtgtgaggtgatatctcaatgtggttttaatttgcctttcttccgtgattagtgatggtgagccccttttcatatacctgttgaccatttgtatgtcttctttgagaaaatctacttgcccatttttaaaatcaggttctttgtatttttggtattgagttgtatgagttcattatatattttggatattggcctcttatcaaatatatggttgacaaatatttttttccgttccataggttgccttttcatttcactgattgcttcctttgttgtgcagaagtttttagtttggtgtattctcacttgtttatttttggttctgttgactgtggttttgatgtcatatcatagtttcttaaacacaatatcaggaacacacaccatcagaaataataaaatgctatgtgtaattatattaagattttaaaacttctgtgtgctaaagatacaaagttaaaagataggttataacataggactatattccaacacatataaccattaaaggattagtatcaagactatctaaagaactcctacaaagcaattacaaatagtttaatggtcaaatttataaaagataaagcccttatggactgaatgtgtataaaatgctacttcatttcactaatactcagaaaatatgcaaatcaaaacaatgagatgaaataccacatcagaacacatcaccagattagctaaaatttttaaatctggcaatatcaagggtagttatagttgaagggaaataaaaacattcacaagttgttggtgggaattaaaatttatataaacactttcaaaaacaatttggcaagctgatattaaggtgaaaatccatacatctgatggcttggcacttccacttccaggtgtacatggaagaggaacatggcatacaagtcaagaggacctgctcaaagatgttggctgcttcaaggtaaagttcagcaatggaagaataggtaaatgatcgtggcatattcacataataaaatataactgcaccactaaaataactgaaggtgtacatctcaacagggataaatatctcagaaatacaatgttgcataaaaatatattaaaggccagttgtagtggctcacgcttgtaatcccaacactttggaaggtccaggaaggtggctcacttcaggccaggagttcaagatcaacctgggcaacatagtgagaccccatgtctacaaaaaataagaacattagccaggcatggtggcatgtgcctgtggtcccagctactccagaggctgagctgagaggatcgctggagcccaggagttggaggctgcagtgagctatgattgtgacactgcagtccagcctgggcaacacaatgacaccctgtctcaataaaagtggcagatatgcatgtattgtgtgaccccatgtacttaaaatgtggatgacacataacaattatgtatactgttcatggatacatatacatgaggcaaaagtatccaaagcctgataaggaaggatacatcctatttcaaggagtggtcctgcaggggggtgaggggtgtataaaaaaaagactctagctctatctgtaatcatttgccttaagaaagaagaagcacaagagaaaaggtgagagaagagaggggaggaaggaggttaaaagatagatggataatggaaacatggattattgctacattttccccgtttttttttttttgcttgaattgtttttataacagaaagaaggaaaagataggggagggaggaaaagattaaatagaaattcaccaaaatgtttaaagcaactatctcagggtagggcatagtggagaattttattcttttatttacatttttttcatattttccgaattatccccagcaaacatgtatcgcttttatgagctgacaaaaacaataaatgctctttgtaaaagcaccttgctaagctgttgtgatttaaacgcctggattgtgggagagacgctgatattctggacatccgggccagctcccggagcgactgtccaagacaggtttctgggggaactgataagcgaacaaccgaatttaaattccagtatcagtagcagcaacccaggcctcaggaggtgagggctccaggagtctccatactctgccggcctcccaggggacagggctgccacaagagataaaagccagctctctggttctctccaaaaatctttgaaaatcgttttttgaagatcgaggtgactgaacctcataaccatgttatcacaggccccatctatgccattgaagacaagacgggcatccctaaaagacctagcccgtgggcatgatcctatgtgcttcctgtggacacccggctcaatgactggccaagcccatccccagtggctttttcatattgcttaaaacacctctgggaagtcttattaatcttgtctctattttacagagataaaaatgggactcagagaagttaattgacttgggacagggccacccagctaataagcagtatggagtcaacacccaagaaagccactctgtgccccaggggagtcccaggaggccaccctttgccccagtagtagaatattgggcaccaataacaggctaaggggagaaatcatattggatacgtatgcaacattccccaaagtcccaaacccaccatgacagcagccccaaatgcaggggcagaacagggcctattctgaggtcaaactgtacattcctgtcccctgactccagtcctccaatccccctcagcccacaggggtccttgtaagctagagaagctgccacattcacggtgcccaccctgtcctcccatctcccacttcccgtgctcaactctcagacagttaatgtgaatagatgagaagtttaagtaccttggaaagggctaaatgaataggaatgggaaaatcccagtgtttttctcccatcagtctttctgattgctcttaactctatttcctggacagggtctgtggcagtcaagctcctggctagtcattttttatcaccatcgggaaaaacacacagtacttagagcagcaggggccctcttaatatctaggcaggaggtaacccacagggcagctattccccaaaactggaaatggctcttggaggcccggcaggtttctgcacaccaaccaaacgcctgagctcccaggagggagaagaggaagactggagccttctgcccagcctcctgattttcttcccagggctcccggaccccctaccccaagccttagcccagctcccatgctagatgacttcatatcctatcccatggggcaagttacagaaaaactggaactccccatttttatatgaaagtgcctcaatttgttattagtggcaactaattttaaaaagctctaaatgctctctggactgaatgaaacaagtctgcaggatgaatctggcctctgggctactgtttggtccacgggctggctaagagcaggtctaagacagacagcaaaacaaccacaacatataaatgatagaagatgcctcatgcctatcctgccctgactgtgcgccagacagcccatgctacagccattgtgtggcagtgaaagaaggcctcgcatgaccagctccgttttgctcctaacctacccccacatgatatcttctaggttaactgctattgctgatctctgcatgtaggccaagctcactatgggaggaatttcatttatagtttaaagcaaagacgatcatggtctcttcccaacactcacccccaaggagataaggagggcatcccacgagcaacaccacgtgttcaagatgcatccctggaacctgaacacgggcagaagattgcacaacctccctggacccttactggagcaggctgtccgcggtcctcagtcactttttttttttttttttgagatggagtctcgctctgtcacccaggctggagtgcagtggcttgatctcagcttattgcagcctctgcctcccgggttcaagcaattctcccacctcagcctctcaagtagctgggattacaggggtgagccaccatgcccggctaatcggctaatttttgcatttttagtagagacagagtttcaccatgttggccaggctggtctcaaactcctgacctcaggtgatccatccgccttggcctcccaaagtactgggattacaggcgtgagccaccgcacctggcccttggtcactttttcatcccaacctcccccgcttcccctttcccttaacatcaaaacagcctgagatttgtactgacttaggatggttctgtagggcattcatctaccctcctcttggctgctggctctccaaaataaagtcgtcttccttgtcccgactacttgtctctcgatgtccatgggtttgggcttatgctaaaccaacaccatgaggtagcggcgcaggtgttttcggtgcccttggtctatcccagatgtcagcagctactatggtgggcaggcccacaaatgcgggcagcagccctcccgagggcctgcccagcctctccacactctggctaccaggcttcttccagggatacaggatgaagtcttccaacgtgggagctgggccaagacctggggctgctcacccagaagtggggcagaagtaacccttggcccatgggatacaggtatcagtggatgcaggcctctacctgtggcctttggagggacaattttgaggggcattctgcatgtacctcagggggtcccagacaccgcgagcccctgtcacctgcagccataaccagcccagcaatgcactctttcagaggaatccgagttaagatagtttgctgataaagaccctgcagctcagagaggtgaagtaatttgccgaaggcctctcagctgctgaaggacactcagggattgaagaaggacgaactggctctcatgtcctgctcctgaccactgcactaccaccttcttagagaaaaccagtcggaccctccaggcctgtggctggttcttgctttctgcatctgaacctgtcagtgagtccagaggagggctcgccaggactgtagccaaaaaacaagagtcccatacgtgcactagagggtccaaagagagcgcagtcggcgggacacctcctccttaatttgggcccaggatgccacacagacctccggagcttacctgctcttctccttggaagggacagatcagagctggaggggcttcgagctccctctaggggccagcgagacctgtgccagccccagagctgcagcaggccccgagggcaggcgctgaggcctttgctctacaatgggaagacgggagccgcccttccccagaccccactggctggggatgaacagaaggctcataaagaagagttgttccaaaagcttgcccttcctgggacccagtgaatcccccattgcctcaagacgcagggcggagagctgatctgctcaggatgtctggagcgagcggggctcatgggcaggcgagggtctgggtgtgaggcaggcggcgtgcgaggcttgcctccctgcagactgtcacgctgggggtctcactccccttcctcgtcgccccttcccaggagagtggacacaggctaggaccccaggcctgtctgcagcgtggcctccgtcaccgtctgtgggatcctgggccatcaggcagctttcctgggtctcagttttcccatgtacacctcaatagccacaatatggattaagctgtccctccacgccaggcctttcccgcatcacaaaagctccacggctccagtgcttagtggtcatccccattgtagagctgagggaactcagatgcagagaggttgagtaacttgcccgaggtcgcacagccagcccacacccttgcgaggctttccgactccagaggccacatggagttctatgcgtgacccttcctctacactctttctttctggaaaatattattttagagacagccttgagcccaacacttctaggatccttaattgagcccaacacttccaggatccttaatctgcaaggatgtagaaaaagaagcctaaatgatccctgagttttgagaggctgtgcagataaactcatcacccctgagcaaaatggaaagagtgaggagtgaagagcaagggcacagtgggacagtgatgggctgcccagggtcctggcactcacagggtagagaggtcagcaggtctgggaactagagtacgctggatccctgggtgtgcctgcaacccctcaccaagacactccctgaaacatccccagggaaagacccatcatggcctgagctgcagccatgaagatttagggatcatgtgggagagaaaagttggaaccaagggcccacactcctcaggaggggtgccaccccacctctcctcacactaacccagctctgcagtcttggcaaagtcctgggagaatgaacagagtcccccatgctcagcagccaggagttggcaggaggatactgccatggaccccttacatggccacagccaaggagagctgctgtggggcacacctgcccttgtgcagggccaagagtgacctacatggctgttccccacagggcggagacccgggagagtctctctagcctctttttcacagcctcccctgaagccactggcatgtggccagcgagacccactgccctcagagaccaatatgtagccactgacctctgtcaggagagaagccaaccagctcttgctctctgcccactttgccacccctaccattatttttggggccttttaatccctccataaacccacctcataaagcagagtatcagtgcttctcagcagtgtccagaccctcccccagaggaccagatcaggagggaaaggaggagggactgagtcctacacagtggctggcacccctcccttaccacttgggctaaaatcccagttctttccgtctgggcctgaagatctgttataaactgtcccatccctcatgacctcagcttcagcaggggagtccagcacccggaatccaggaagaggcaggaaagcgtctgctcacatgaggagtcacatccattgcggtgcaggcccccggaggggtcagggctgctgtgctgttcccatgttcccagctaggaccctgagcctcagacagggccaccaagcagagccaggccaggagcccgggctcctgatgacacacttttccacatgtccatcccacacactcccagtcagccccttgctgtccactcacccaccccataaacacctgcagagcactgaggctggaccctgcggaggctgcctgaggcatctgaaaccagccaggttccccatagaactgatgtttatggatttattttcataaacatagaaattgaccctcccagtcttaaagcatgaaacttacatttgtcttatctgagttcctttcccaggaaaccaaccttcaggcctcctggatagtatcaagaaactgaaaatcctcttctttacccctctggaagcctattccttactacataaactcccaattttagtcaattgggaggatggatttgagactgatctactgtctcctcagccccaacacccgaaaaagccttcttccctggcactactcattgtctcggtcactggctttctgtgtggcaagcaacaggacctaaaccaaaacctggtgttttggtaacacatctgtagagtctaggcaggaatctggaccaagtgctccttggggtcaggaagggctcaaacttgctgggccccccttatgcccagaaatgcatatacagtggcctcgggtctggaattctctcccacagggcccagaagaaggctgggccacagacacaaggaggagtatgaaaatgcacttgtgtagcccacatgattaaataacagggaccacacacacacattgtgccaatgtcaaattcctagttttttatatcgtgccatagttatgtaacagtggagcagcaaaagaactaacagcactcactccatttttgtttaaggggcctttacctgttcctgcaggtcagctagaataattttaaagcactgagataaaatgcaaaaattgcattcatgtagttcttgaaactgtattagtccatctttgcattcctttaaagaactacctaagactgggtaatttatgaagaaaagaggtttaattgactaacagttttgcatggctagggaggcctcaggaaacttacaatcatagcagaaggtggaggagaagcaaataccgtcttcacaaggcagcaggagagagagtgaagggggaagtgccacttttaaaccatcaaatctcatgagaactccctcactatgatgagaacagcacgggggaaccccccaaccctcaccatgatccagtcacctcccaccaggtccctccctaacatgtggggattacaatttgacatgagatttgggtggggacacagagccaaaccatatcattctgccccggcccctcccaaatctcatgtcctttttgcctttcaaaaccagtcatgccttcccaacagtcccccaaagtcttaactctttccagcattaactcagaagtccaagtccgaagtctcatctgagataaagcaagtccattccacttatgagcctgtaaactcaaaaacaagttagttacttccaagatacaataacggtacaggcattgagcaaacgctctcattccaaattggccaaaaccaaggggccacaggccccatgtaagtccaaaacctggcagggcactcattaaatcttaaatctccaaaataatctcctttgactccatgtttcatatccagggcacgctgatgcaaggggtgaactcccaaggatttgggcagaaactaactctgcgattgaaggggaagtgtgtaaataattgtgttttgttcaagatttataggagcactgtgacctgacctaggacagaggagttcccaacctcctgggaccttcacaggcacccagatgtctgcagctggtcacacgtcttgatcccaactcccttcttttccccctgccctcaacatcaaaagagcctgaaatgtgtgctgacttgagacgacctttgtgacactaacccactgtcttctcaggttgctgtctcttgaataaacctgcttttccttctaccaagtcttgtctcccaaagttggctttcaagtgtggagcagctgaacctgggttcagttccagtttcataagatgtgaccaggagaaaagcaagtgaagggtgcactggttttctatctttagggacctctcttactgctgtctttgcaatttcctgtcaatctataatgatgccaaaataaaaaccgattttaaagtcctcacagggaggtaagactgtgagatgtttctgtgggatggtggtgtctgccaggaaactgaccagctgacctggtgagtctgccaagaaggtgccaagctgtacagatgctatcctgggcagcgtcttcctgccccaggctccagttcagggcatgtctcgcggttctcttcttgtccattgctgccagtttgcaaagacaaccccataggagaacataggctcctccatgtgaatagaagagaccctgatttatttcttggatggggaaagatcttggaggggctgcaaagacttacaagaggacagtggggaaacgattacatgtcagggtgtttcattgtctggggcctcagcagcccaatttactgttcctgggaggatcagaacaagggccatgataaaccaaggactggaggtgagcaggggtggatgtgagagggactggtgtcaggagaaatttgtgcaaatggctcacaacagggaaaatctctagttaaaaataggctaacatcattcccagcagcccattcctttcccactgtgctccccaggaacaatcccactcatcatgataaaatctggggaaagagaaaggctggagggcaccacccccccgcccctcagtgcagtgttccagggcctgcccactgcctggggaggcgatgccagcactcatctcacagcagagcatgtaccatcctgtgccatcctgagcactccttgcacactgtcatttcctgcccatatcaaccctctgaaggagggcccatttcccaggtaaggaaaccgcggccgagagagcttacggaactcatttgaggtcacgcagccaggtctatctgacctcagctgattctttgaaatgctgtgtcaggctgcccccagcagtgacaaaggtgacctaggatggagacatattcctttaaaacagctggagtctccaggggtcaggatggatgcttgagtgatgggtgcaggcagccgggcccagaaaccctaaggtgctttctctgccattactcagagcccctcgatgtccccccaaccctttccaaagtccctcagcctccatcatgtttgatcctgaggaagaagaggtctgtccagccccattttgcagatgatgaagctgaggccagagtctcacaacagagcagacaccacatcaggccttctgactctgggccgtagaaaggctctgcagagaggaggtgtggggaggactcctgtgaggcctggcagggcatgggatcccctctagcagtctcaggctataggcagcagaggcagagagtgagcctggcaggggttctggagctcctggcctcttcctcggcctaaatctcggcctttgcagcatgcgcatgtcagctgcacctctgacctcaccaggggctgccagctgactctgatttacctggagcttcctgcttcagggacagtgaggagccagccggcctctcctggatctgcacccagtgagctcccattcctaccctccctggggcctgggagctcagggaaggcactgggctggaacagcaggatgggctgagcccatgggccatggcactggggacccaggttcctgtctcccccagaccactagatgactaacagtgaaacagcaaaagaactaacgtcactcactccatttttgtttaaggggccttgacccattgctgcccacaggctaagataattttagagcactgagttaaattacgcaaaaacagcaatcatgtcgttttttttaagctaacactgaggctaaagggaagtctgtcaacaaccaactatgttttgttaaagattacaggagtattgccacctgaccgaggacaaatgtgttcccaacctcctcggaacctcgctggtgcccaaacgtctgaagtcctctaccacctcttaatcccagcccccttttcttttccctgcccttaacttaaaaagaacctgaaatgtgtcctaactaaagatggtactttaggacgctagtccgccatctttgtggtttgctggctggtctgaataaacctgcttttcctcccaccaactctcaccccttgtgtttgatgtttaagcagtacacagccgaactgggtcctgttacaactgcagctgcttcccatatctacgggatccccattggtgtggtgctgaccgcctggaagtcctgcagggactcctaactgtgaggcacgtatcccaggagcaggtcttggcctggtaagactgtcctaagtcagaggctaacagaaagcctccagcctggtaggatttgaaaggggatcctggaaaagtccccaaaacctcccaactatgcctgaaaactcagaggtctgcaacagcccccagcccacctgaggaggaggtctgcattactccacctccagggctgtctgtcttttatcaacccggatgcaggggcagctttcagggatgcatggtatggggcggataggagctactgggatgagagcggggctgcaaggggagggggcagacttccctatccttgtcctacttcattctccctccatccctgcccggttcatgctcccattcccacttcacagatggcccggccacaatggtgaggggtggctgaagccaggattcaaatccacattacctcactcccgagctcttttccccatgcaggactgcaaggaagagaggatggatggacaggtccacattgtcaccagtccaccaccgtggcccctgggacacagagcccccactcagcccacctggtctgccatggacaggataagttagcaaaaaccaagatgaacaaaaaatataggaaatctgactataagttaataaatttgatttgctacagaaaatgcatctactttttcagcattcatgaccaaaataaatacttttgaccacaaaaaataccctctataagttccaaaatcatataaaatgatatgggccacattctttcatcacaatataataaaactagatgagaataattaatgtttaatgttaaaaacctaatcatttagggttttgtgtgtgtgtgtgtttgcgtgtgtgtgtgttttggttttttgtttttgttttttttctgagacggagtttctatgttgttgcccaggctggagtgcaatggtgtaatctcagcttactgcaacctctgcctcctaagttcaagtgattctcctgcctcagcctcccaagtagctgggattgcaggcgcctgccaccatgcccagctaattttttgtatttttagtagagacggggtttcaccatgttggccaggctggtctcgaacccctgacctcagctgatccacccacctcggcttcccatagtgctgggattacaggcatgtgccactgcgcctagcccatttaggtttttttaatttaaaaaatctaaaagtctcctacaaaactcttgggttaaatagaatttgcacactatttagaaaagaatgacaatcttagcatcaatcaaagcttacaggattcaaccaaaagtagactcagaggaaaatgaatagccttgtttgatctcatgactaaacgagaataaaaataaatgaactgaagagtctactcaatcattagaaaaaggagataaaatgtagcacaagaaagtaggagaaagaaagaggcttctgtctccacctgagcaaaataaatgctcaggttcccatttcatttacccacagacagtttgcacacagtaaggcaatacagatgcttgagactctgctgtagatcattttacttatggaatctgtttaaataaacattatagaatatttcctgacatcaaaaactattttctacgtaaaattattttctatgtaaaacattaaatgaatgtagcacaacttcaatgtcagagccagactaaaacttgtgaatgagtatccttgaccccacccactagaacaagtccaaccaatcagacagaaaaatctctgacagaacacctgcgtgtgctctctctctctctctctctcaaccccagatgccagattcaaaaactaactaaatcaccaccatacatataaggtttgttgtaaccaacacagattatttgaaaaggtgaaccgatgatggtgataattaggtgaattcatactaacaataatcattaaatattaaaagtataatttattttacaaaattgcccatgcaaggccaggcgcggtggctcatgcttgtgatctcagcactttgggaggccgaggcgggcagatcacaagatcaagagatcaagagcattccggccaacatggtgaaaccccatctctactaaaaatacaaaaaaaaaaaaaaattagctgagcgtggtggcacgtgcctataaccctagctactcaggaggctgaggcaggagaatcgcttgcacccaggaggcagaggttgcagtgagctcagattgcgccattgcactccagcctgggtgacaagagtgaaactccatctcaaaaacaaacaaacaaaatgtccatgaactgaaaagaccataatgagggcagaaagcctgaatcaagtactacagaaagttgaaaatgagcgattttgaggaacacagcatgctgtctgcatgagtgtggcagaggaacccgctgactccagtgctggctgaggtgggccccctgacacgttagtcagggcagctgactccctggcacctgtgaccacagggcgcatgactgaagaccgagagcctccttgtgcttgtggtggtgtctcctctgccagcagtcaatgaataaactccctggggacagaggccagaccatggagccctccaggaagcttactgtcatgtggggcctgaagtgagtgcacgtcaaataataatctctacaaaacgttagcactattggaaagatcccactcttatcaagaagcaaggccaaaataataagagatgctgaggaagtaggggaggtggaagaggaggaaacgaaggacagggaaaaagaagaggaagggaaagaaaacagaaggaagaaaagaggaaaggaaggaaaaacggaagagaaacagcatattatatgcgaatgtctgctagcgttccatttgaacacacctgctaagcaatttttagaatccttcagtgtccacctcagaaccttccagatcatcctcatctcatatgatccacccttggcctgcagcagtgattgtctgtgtgacccacacatgtctgtgttgattataattaacttaataaccactttatttttaacaaatttattgaggcataatttacataccataaaattcactcaaaattactttaaagaatgcatcatgaacaacgagaaaagaatgtctgcaaagttctttggggacctgcaattaaagcatgcactgaattgcacctgccctgagaagtggctgccatggactggaccctttgatccgctttttaagaaagagccaagggcatgtggattccagggggcaggtgcgaccgcatgtgctcaggttcctggacattcttgcagtacacagagcagccccacttcatcgcacatattatttctctgaacactgctagaaaggattgtgggctataattagaatgatgccccacaggattacattcacaaatgtaattacataatcatttagagctgactggcacaggaaacgacattgcttcctaagtgtggagtgaggggaggtgctgggcacctctggtggagctgggcattctgagactcctttctcatgccagctgagcccagaaacagttggagatgagtccaaagatccgtaattcttcactggatttgtcttggtcatcagtctgtatcccagggtcccaggtttggggttacacacagtgcaaaactacccactagtggccgggcacagtagctcatgcctataatcccagcactttgggaggccgaggcaggcagatcacctggggtcaggagttctagaccagcctgcccaacatggagaaaccctgtctctactaaaaatagaaaaattagccaggcatggtggcacacaccgataatcccagctactcaggaggctgaggcaggagaatcacttgaacccaggaggcagaggtttcagtgagctgagatcgagccactgcactccagcctgggcaacagagtgagactcagtctcagaaaaaaaaaaaaaaaaaagtacccaccagtaacggttgcaccttgagttgttgtttcaaaaatttccagcaaaaagctcatctctggtaaaacaaaaactgattggatccagagatgaactctggggaactctcctagttaccatactagaatccatggccagagaggaggctgttttctctacatgcaacatatgtggaagcatgatctacgatcgccttgactccgcctctgcatgcaatgactcagctccccagcccaatgcaagccctgctttctccagtgtttagaaaagcactgctctgggaacgatccccggtgttgtgagtaataaaagccaacatggttgtggtcattgcactgccgaccaccaagccatcaaacccacccatggtgtgggtgacaagtccaccacagaatttcatggatgatgtggaaacttcccaagacgccccaaactggacttctcccctggctcctgttaaacgcaccaggaaagtgacaacgggcttggcatccatctgttcttcttgtttgtttgatagaaatcctgtctgtggcacatatgtgattgcaagcacagagtgccggccacattagaaaagtgcatagtgtctgttgtcttactctcctgaagcctgggcggcactcagtcctttggagtttctccagcgttgtctagctgcaggtactgagtccgtcctatttcacacagagatcaacgtggcgacacacgcctgggcttcctgacacatcctgatcttgcatcacttcattctctctgatggcagtgattttgttcagtatgccccactttccacaattttctaagatcttccatatatttgcatgcatgactgagaagaaaatatcttttgttggtccaagtgtcctaaatttgggtccaaaaaaaaaagtggtagctgtataagtagaccacatcttttgaaaaccatgatgataaatcacattaatttggaccccattaatctggactatgtgctaatcccataggcctaagaggaagcttagcttagaagaaagggtttgctttctaagcaaagaaagatgcaaacaagccacagcaagcgtaacctacttagaagcagatgctgtccttaaagaaaaaggtgtgcaataagctacactgcctgtgagtcctaaaccccagctcatcctccaccttcgccatcagccagcctacctacagtgtcctatgaaactcgagtccctcacccattccaagcaaccacagcacttcctccaaaactggcatcagaagtggaaatgctcctggaggctccctggtcctgtagcctccttggggaaactgaagcccagagaggggacggagccagtccagagtcacacatccagcaggtcagcctggtgattagagctcaagttttgactcctccagactgagtttttaaactcagcctggactcttacttggggatgttagacaaattccttgaccccatcgagtcaccatgtgctcatgtatgcaccgcagagggaggcaggagcctcccttcccactgaggtctgggtaagactggcctgagctccaactctgtactctgtgtaagtccaaggccctccccaagatcactgcaaatccttgtgctcatccctgtcccagaatcctgcttccctgacactgtctctgttcctcaccacgttgactcaaatgagaacacccagccccatcctcaacatgcacacacaactgtttgtttgtttgtttgtctgtagatggagtcttgctatgttgcccaggctggagtgcagtggtgtgatctcagctcactgaagcctccacctcctgggttcaagccattttcctgcctcagcctcccaagtagctgggattacaggtaaccatcagcatgcccagctaatttttgtattttttagtagagacagggtttcaccatgttggccaggtgggtctctaactcctgacctcaggtgatccacctgcctcggcctcccaaagtgctgggattacagtaggcgcaagccaccgctcctggccgcacacacaactttctaagtgttgcaggctttgttgaagggagtagacttgggttgtgtccttagcaggacagaaagagggccagggttttgtactcctttgtcactcagctgtgagctatggggagcagggggtgtagtgagaacaaagtgattctggggtgtgttcatccactttgtgttgctataaaggaatacccaaggctggggaacttataaagagaagaggtttgtttgactcatggtgctgcaggctatataataagcatggcaccagcatctgcttctggtgaagcctcaggaagcttccactcacggtgggagaagagggaacagatgtgtcctgtggtgagacagggagcaagagagaaaggaggaggtgccaggctctttttctaaccatcagatgtcctggtaactaacagagcgagaactcactcatcaccaaggggacagcaccaagccgttcatgggggatccactcctatgaaacacctccccccaggctccacctccagcattggggatcacagttcaaaatgagacttggaggggacagacatccaaactatatgaagggcaacagccaacacacagcagccagggcagggagcagcagctcaggaactggggctaatctgggcaccaccagtacctgccgcaggggaggaggtggagatggggctctctagctctcattgcaaagacacacttagcatcaggcaccactgttcttaaaacagccttggcctgcactctcacccacatccacaccaccctcacaccctcttgcccctttcctcaatcctctgcctctctttctctcgtctccctccctctagagaacaacaacaaaaaaaaaactcattttcttctgcagaacaatttaatcattctttaattcctctgttgctgagctgctgccaacaccctcaatgtggcgacccccatcccaggttgccagttttagagctgaaagtcccccatcccaggaaaaccctcagtcccaagcaaactggaacaactggccactctccaaactgctcttccagcagccacggtggctctccaggctccctcccaaatggacagtaagtaggaactggctaagacagctaatcatcttttctttttaatcatgaatgggtgttaaattgcatcgaatgctacttcagcctctatttggagtcacatggtttaatctaccaatggagtaaattacattagtagatttcctaatgccattcctttgttgctggaataagtcacactggaacacgctgtatgtatttttcttgtgatcacattcttgatttgatagactaatattttatcagtaatgtttgttcctaaattgagtttcattcaccgtagtctttggccgcttttctctgatgttggtgcctggaacagacgtgccttttaaaatgagtgtgagagcactcccactttttcacacctatttccttcctgcctggtctgggggcatgagtgacaaatgaaagaagaaaggcatcaaaagacataatataggacatttgtttcaaggtgaaggactttatgtttatatccaaaaggcacaacatgttcaagaaaaatttattggaaatgacgagcatcaggaaatacaatggttaaagaaagaaaataattcttcatgcactcacagaggaaaaagaagaattttcgggggaagggaggactcataaaatcatgctggattcagattcttcctcggcaagtttcatccagagggtaacggagcaacatccacaaatcacagtgaaaataggaacccgtaatgctgtggtcatctgacttgtcattggagccaaaaagccacaggcaaacattctcaaagagcctggaagaactcagggagtgccgcagccatgtgcgtgtctttaaaatctctgtgatagttacatccgggcaaagtgaatcacaaggaaaaggaaactggatattggggttgggggagggaagatgcagggaaagaaagggagggggagggaatcctcacactagtgcaaaacccatggaaaggcagctttaaagggaaaaccaaatatgcttcaagttgtccttaaaatataaaaatcaagagacaggcattctctagcatgaaggacacaggcaacacagaacccatgatgcttgaaaagaaagaaaaaccatttcacaataaaatagagcctcaacatagaggaaaaagccttggaatggaaaagtcatgaaaaaaatgatgagaactgaatgcaacaaaatgtagaattaaaagaaactctgcagaagagaatccaaacattataaatatagacaaggtaaaaagactagtgaacaaaaattagtaggggaccttcaggaaaaaaaaaaacaaaaaactcctaatttcctcacctttcaacagcacagagcccgttgaaattgtctagaatggaaacatcctttaaataaaatgactcccagcttattttttccataaccttttttccctcaatcttcagaactcttttaagaacgatggttttttgaggcaaagaaacattgctctgaaattcaaccattgtctcagtttcacttcagatatttcattgctgctattaactaagaaaaattcaaccattttattttaaaggagtatgtgggccaggcacagtggctcctgcctgtaattccagtattttgggaggctgaggcaggaggatctcttgaggccagaagttagagaccagcctgggcaacatagcaagacacccatctctattttaaaactttataaaacttagccagacatggaggtgcatgcctgtagtcccagctactcaggaggctggggtaggaggatcgcttgagcccaggagtttggggctgcagggagccataatcacaccactgcactccagcctgagtgacagagaccctgtctctaagaaataaaattaaattgaaattgttccactttatcacactgctcctattcatgtatctgatatattcctagagagacatctggaacgaccactagttaattttaacaattatttctggatagtgagatgttgaattgtgtataattattcttttttcttttatttttgcttctctttcacttgaatcatttatgaacatgtaatatttttgtagaagtaataaaggcattatttttaagggagagaaaggaagggagggagggatggaggaagggaagaaggaaggaaggaatgaaggaaggaaggaaagaaaaggggaagaaaggaaggaaggagggaggaaagaaggaaaaggaaggaaggagggaaagaaggaaagaaagaaggaagggagggaggggtggggagggaggaaggtaagtaaggaagggatggggagggaggggaggaaagaagggaaggagggaggcagggaagaagggtaggaaggggtggggagggagggagagaaagaaagggtggggagggagagcgggaaggaaagaaggggtggggaaggagggaaggaaggaaggggtgggcagggagggggggaaggaaggaacgggtggtaaggagggaagaagggaagaagggaaggaaagggtgggaacggagggagagaaggaaggaaggggtgaggagggagggagaaatggagggaaggaaggaaggggtggggagggagggaaagaagaaggaaaggaaggggtgaggagggagggaaagaagaaggaaaggaaggggtgaggagggagggagggagggaaggaaggaaggaagtgcgccaaagctcttaggcctgaatgtccaactctcttatctgccttcacaaggcccaagcccctctcatcagtggccaccttcctagacacccacatccctgcagcagtgtggtgacgccagccaggggctgctctgactctgactctctgaggcgcctcaggaggtggggggatatttgacacaacagactccttatcaggctatgattttgcctgaaaagggttcagcttttgtctccccttttctcttccatagccctggattcacttcagaaatcaacacaggaattgacaggagtcaatgggccatccctgaggtcacagtggtcagagccctgggctgggggtcagaagaccaggctttccctggcctcactgcgcgaccctgggcaagtctcccccagtctctgggactctgttttcccctattgaataagagggcctgcggctctgaggttccagcatgcagtgaactctcattagcaatggtaaattaagaataggcatatgggccgggcatgctggctcacacctataatcccaacaatttgggaggctgaggcaggtggatcacctaaggtcaggagttcaagtccagcctggccaacatggtgaaaccccatctctactaaaaatacaaaaattatccgggcttggtggcacacacctgtaatcccagctacttgggagtctgaggcaggagaatcgcttgaatccaggaggtggaggttgtagtgagccgagattgcgctatagcattccagactgggtgacagagcgagactccatatcaaaaaaaaaaaaatggcacatggtactgggctggacggtagaggcttccacccgaggcccaggcacaccccccgtgtcagaccccattattggctgctggttgatgaagtgtagatgagctcaggtgggttcagaaacttgcccaagggcatccagctagtagtcgagtcagaaacaggatctcagccccatcctgtctcgccctaaagtcttattttcagttgctactccctcagttgcccctccctgcagcacccctgtccctgagccgagtttgagcaatggcacaggggtaggcctctgctgctggcctagttccatgccctgggacagaggggagagacaggctcagtccctccccagggccaagcagcttgctgccgcccaggaggcactggtagaggtggccagtccagggtatgggaggagagggctgctgaggcaaggctggcctcctgctgaaggctggggctctcctggaggggtgggcaggactggagggaccagatgtggtcaaatgagagcagtggagggactaggcacaaccttctgggaaggaggcagcttggggcctcctccccagagcttcttcagcaccagggtgcctctcagagctgaggaaggcctgaagtgcaggtcccagcatggaactgggatagtggcaagtgagaggagctgcagccaggacagtgctgggcaggaccgacgtgaggagggcccggagagctgccccatcactcatgggtccaggcagggcccagacacacccctgtccaggaggctgtggaggggatgcctgccagtggggacggtgggctccatcacccctgcagagaacacatggtctttctactgcccagatctgccacctcccaaaacgacaccttgctattccttgggctcagcatgcttcaccaccctcaagtcgctgtggttctgagagatgcatgaccccaatctggccagttaggacgccccagtcccctggccactgccaggggttcgggtatagaaacatgacttgacttggttgaggccactcattctaagacttttgccagaatcactagggaagggagaatctctggattaaacccaaacagcaaagtagacagacacatagacagggagagagacacacacacacacacacacacacacacacacacacacagagagagagagagagagagagagagagagagagagagccagcccctggatcaagccatgcctgaagcctgaccttttgttgactgagtcgataaatcgccatctttgctttataagtatatgatatgtttctttttcagctataactgcaagcatcccaataaagcaggttcctgaggcccttccagttgggatttggcaacttctctatcctataaataattccctgctaggcgtactactgtttctgattgatctcacctgctcaattctcaaggctaattatgaagtaaagcagtcaacacgtggcaaaagtccctgagccgacacctgggggaacaaaatgctaccatgtactggctgcacatgaccgaaacacatgcccccatccagtcaccaggctcacccttcaaaaaagccacctctggcaaggtgacagaggccaccctctttgcccctgggcctacttctgcttcaaaagacctcgagggaagggtctcaactctcccactaattgctaggaaggaaaattctggggtggaaagcaggaggggtcgggccaagcaacactttgcagaggacattggtcaaggcccaggctgactttcccaggggagcaggtgctaaggggctactgtgtgtggttggcaccaaagcctgctgtttgcagacagtgagttggaggaagcttgaggctcccaaaagcccaagcaaatggggtgaatgcaagggtgagaggcacccacccgcacctgcacacatgagcctgctgagtccccactggaattccctgcttcccatgcatgtcatggggacctggctccccagccaattgtgagctcggggtgaagagctgaatgtggcctatctctgaacaccctcagcccagatccccgcctggctgggtgttcaaaaccgaacgaacaaatgaacgagtgaatgaatgaagcaccttccacgtgcctggcaccattcagggctctggggcttacaggagctgaaggcaggcaagggctctgcctgggtgctcaccttctctcagagcatacctctcagcgggggaaggtggccatctagacaagggccgggcactggtgacagcaggctgccttgggccacccctgccagttaggactggctgaccttctaactagcactaaatgtctcctgtccaagctgatttcttcaagtgtctgccccaggcatggcatttcaaacttccctgagcagaatgacacagaaaagcacggtgaagtcttgggggatgagaagcccgtgggaggaggcagcccttgtgattcctgagttcatgcagagattggacccaacgtggtcccccagctgtcctgtgctataatgggctttcccatagagtcctcatgggcagctcagtgtcacaaaccattttgctggaatctagaacctgttgctaaggccaggcctgggtgtgacctcagggggctgaggactggtggtcctacacaaataagctccctcttccccagctaccagccctgaagctctgtgaggtcagaacagcaggtcctgcgggatcccttctgcagggccatggcatcccctttgtttttatatttgcatgtaaagaaggccactcaggtgctcaaggtcaaataagcccaggtgactttccatgctagccaactccttccttacaaagcagttgagttctacatccaggcaccggtgaccctcccaccatctcactgatctcgagatgcagggaagaaatggatcaagctcccccttcaccaatggagaaactgaggcccaaagaggggagatgatctgcccaaggtcatgaagagatggcagcagggccagcaccagagctgccactcctgcgggctcctggctcagtgcttttcccactgtgccatgatgtgaagctggtagtcctttttctctcctactgaaggaactaaaacacagccaaactgtcaaaaatatcaggagcaagatgaccacactccaaagaagcaacagtttaatgattctccacaacgccctaactgcttgaaagatagtgcattcttcaaaactgccccatgccgaacagcctaccaaatagcttccaaagttgcagatcaaatcattgctgatattttgaggagctccgtgtcaatagctgatgttaatattttctgagagacggcattgtggaacaaatgcaaaaccaatgccatctgtctccaggaaacagctcgagattccagacatcggagaggcctgacacaaccaggttccggcacgagaacccccacagaggtggagcaagatgggaaacaaagagatccatttctggtccagaggaatcctcccctggttcttagaagacaaaattagtgagatctctgaatgattcttcctctttaaaacgctgagcccaaatgcgtgtttgtgatatcatcatcacatttggcagcaggttggcgtgtggtcagatagcaggagggacttcctcagtaagagatacagagatctgcaagagaccggccactgaggctggttaccatgaatgcccgttctcccaggaccaattgcctgaataagacagcctccaaaggcgcctggaggccgaggactcttagaagactgggtcagctggtatacccatcagaagccggctctgggaacttacacagaggggattttcaggaaggatactgaggcctcacagactcactatgcagggagcaacttgggcttgggaaatggtccatggcagctcctgaagtccaggccttcagatgcactgtgaccactgagtcagccctcagaagactccccaggaagcgtgcagcagagccccagggtggcccgttcaggagggcatccctgcggggatgacagcactcagcaaactgcctccccgcagatacagccactccagctccggagttcctgaagacctcagaggctcttaaatggcgagcatccttggctacccagcacggaggctacttgtgtacatcttgtttctatggtaaccccattccccaaaccctaagcaggacataaggttagatgagacagacacatgtgcatggggagcaaggagcaggttttaagcctggagaactcgggtgcccagggtggctctggcactatctctctgcggtggaccgtcccagtacacccgggcagctctgtgctcccagctgccctgagcatcagtgtcatgggctgaaccaacacacagggcagccccagccctccctgctccaacctctgccggagtcagggctctccaagacagtgcagctgggcaccatggtggtgaccggacgccaacagctcaccgccaccccgttccctcggatggacccatgtgcctcgtgcagtggaaggggctggctcttgtccttttcattctctcatcagcctggttcccctgaggactgcctcagtctcttgattggattggggactgccttagcatgctctggtgacaagtgacattcgtcgagtggtgggactggaacagatatgccacagaacagacgatggggctgctgccatcggtcaccaggattacaaggagcgggggccttggaggctggacgaatctgtcttaatgtaggaatgacagtcaggacccttggtgacaagtgacagaaacacagcctgagccagatcagggaagagggagggcttgtaggtttacaggccaaacctcaggaaaggctggcatgctgcggacagctgggatcaccaggatagtctccatctctcatccgcctttcccaggatcagcaccacgcttgcagacctgtcccctctgaagagcttggctgtggcagccacaggtcccagctcacaagctcccagcctccctagggtgatgaaggctggggcaaggccttttctcagcccccagttgaaaactcctgctgaggtgctggcttggagcttggggcatgtgcccttccttgggtgccagccccatccttgcccccaggacctggatggtgagtaagggaagatgtcccccccaagaggaaggatgctgctggtgccaacaagaagacagcactcagcaaagtgcatgatgcccacttcagggccatggcctcagagcatctccgtgtcagctctttttttttttttttgagagagagtctcgctctgtcgctcgtgctggagtgcaatggtatggtcttggctcactgcaacctccgtctcctgggttcaagcaattctcctgcctcagcctcccaagtagctgggattacaggtggccaccaccaagcccggctaatttttttattttttagtagagatggggtttcaccatgttgtccaggctggtgtcgaactccaggcctcaggtgatccacctgcctcggcctcccgaagtgctgggattacaggcataagccaccatgcccagccctgggctcttcttactggcaagaacagaccctgagtgtggaccctgcacaggctttagcatctggacgggactgtgagtctgttttatgttgccagagaggaatgtctgaggctggagaatttatgaagaaaagaagttgatttggctcacggttctgcaggctgtccaggaagcatggcgctggcatctgcttctggggaggcctcaagaagtttccaatcatagggaaaagtgatggaggtgccagcatgtcacatggtgggaaaggcggggaggggccaggctcctttaaacaaccagctctcaagcgaggtaacagggcgagaactccctcgttacctccaggatggcccaagccattcctgagggatctgcccccggacccaacacctcccaccaggccccacctccaacactgagggtcacatttcaacatgagatttggcggggacgcacacacaaaccatctcagggtgttttcctggcttcatcccgaactgcactgatgtgcagtggaaagaaagtgggggcaaaggtgcccctccccagaaagatgtgccctgagcagggccctcaacccctcagcctcagagaagcacacactcatccactgagcatgccaggagcccccatgagtggggtcggagggagaagccggcaggtgatgtacccttcaagtcactgggcagtgcccagacccaggcaccctaccacgcccacagagcagcagccagacctcccgaccccaccagatgccccccatcctctcggcctctccaaccccctacccggctgtaagctcagtcctttcatgaatggaataggaagtgagacaggggagaaaggacacgggaggtggtggcgagcaggtcactggtgggcaatgggggtttgagcctgcaagacacccctggcaactgcgcaggacacatctcagagctgggccacataagacgggaggaagctgcggcatttatccatccactccattcatccgtcactggctggagccactcctgggatgccgatgcccacacgcctccgtggctatagggagcccacaggctgagtcacaggaaccgagggtaaggtggctggtgtgcagggtggccgtgcgtgtccaggaggtacagggggcatgccaacagcatccactgtgtctccaggcaggcacttctgcagggctgagacaagccccagtgacagggagggggcaggcatcccagcagggctcagtcccagagagaaacttgggcctcattcaaaaatgaccaacagtcagcaagggtattggggtgctgcatttcctgcagccaccatgagcctgggaagctgactgcccaagtggcctgcccggaaggcgcacttgccccagaatagaactctctccaccaccatgtccgtacacactacagggtggggacacagacacaatccaccctgttacatcaagtcagataactctcttgcctgcatcataattaactttactttcttcaaaggaacacattaaggcaaaatgttggggatcttttaaaacaaagccattttcctcactaggattatttttgatgagctaagtggtgttagtttttaaattgcaatcgagagagaaagcacgcatgcacagagccatcgacaattttcatttccaacaattgcagttgtgaatcctgctaccaatgctgctaatagcttccgtggtggtttatactgatttgcctaagagccaaaccccaggcttctgtcttgaagaatcaaagggtgactcgggccaattagtgcacatcttgaaccacaccttctctggaaagaaagcattcttggcagtacccacttatcagaatcgtggggtgttctggagcccctgatgggaaatggagtggtttagaggaagaggttaaatttgacctgttggatcgtgacctcagtggagcattgggggacccagtcattgactctccaccctcaagaatacaaaatgctccaacatggaacgttccagtggacggcggcaaccggcatgctatgggctcctttaaaaataagccccattgttccccaaccgcctattaatagcttgaaaagacatctgttcctaatttggtcttctcaaaccaagaaatcttcccttcactttcctccagggctaggatgaaatcaatcaagctacaaaatttattaagcaccagacacattctgtcccagacctcagagccagccctgcaatgtggcccaagcactcgaaggccctggtctgcacggagcatgcacccttcctccagctcagatggcactaaagagcccccagggtgagccagtcccacccagttcagtgccccagctccctctgctccgtcccctggggtcagctgttcgaacagtttctgactcgaggcatagctcccttagattctgccagggacgggcagctcactgtctctcagatgacccctctcattcccaaatatctgcagctgctaaacactcccaaactcacctcccacaatcagtcccatctctctggggccacacgcagcaggttgactcttctgattatggcaagccttcagctacttgagtggagatgtctgcccgtccccatgactcctctccagctttggtacctgggtagcagggggctgttggggacccaatgcccagacaggacaagcgagtccagggacgtaaagccacatggacgcccattcctggcagcagcttcagcaatcatgtatcctccacgccccctgcacccactcctgcagtcccagacgcacagctcaccattttcagggtacacggtgctcgccacaccccggggcctttgcatggctctccccacttcccagtatgctttcctctgctttctacaaagctgttccccaaccttgtcatccagtccccagtaacggtccctgaccttgctgctcaagtgcacccccagtcacgcccaaagcacacccctctttcaattctctactgtctgatttttctctttattcacatttatcatctttctgcccctctagaatggaagaccatgaataagcacaggggaaggactcaataatcagttgtcatctggataaagaaaacaactttccaggcagaagaaacggcagctggaaccaagacacctggagcagccatggagcagcggtggaacccactggtcctgagcacatgcttcggcgtgaaaaggacctgtggccagctgtggccctgggcaagctgcttgaccttcctgagtctcgcctctgcgtctgcacagtcaggactggcacagcgctggcctcctgatgctgtgtgtggtgctgtttgcagagcacttgatagaatgcgggttcaaagcaaacccttcatctatgggccgaggaggaaacctggctcagtgcacaggccagcccaaggagagagatgaggcagggctggccagtggggatgcagtggccttcaacagcatgtcaaggcttctgccctggggacagcacagtgggaggagctgcccagcctcatgggctgaagtcagaagagccagaaataaacgctaccctcaaggcctagatggggacctgtccctgactctactgtctccgtctgttcttcccctgtgcacctatagaagagcctcaggccccctgggggactcaagctcagggagggggcctatgtggggagcaaatctgcagctgcttctctctgtggctcacatcccctaggagtgataagggagcaggccctgctctccggcctcagcctcagcctcagcctcagtgtccctcccctctgccggtaccagcccccgggtgtgagagaaagcagaggtctgaagaaatgggctcccagagggccccgcctcaaccccactggcccaaggccccctgcagctcctgggcctgagccaaggcaattccgtcagtgccagggtccccaggacacagccaggattgtgcagtccgcggcaggctcccagccacagctgaggggacaaggcccagctgttcctgcagacaagtgggcagctttcttcccacatgaaaagggaacctgtgtctctgggggagggacaggaggagggaagaggccaggggaggcccagggatgactgctcagggtcctgtacagcctggggtgggcaggtggggccaggaagagggaggcagccctggtcctaagcaagcctcccagccaccagctcaacccattctccacctctgacccctgtgtgaccctgggccagccccttccctaatctggcctcaggtttctccattgaaaaaaaagaggaggtgaagaatttccccttcgtcctagcagagggacagcttcaaggacgatgctgcctgtctccttgaatggctggactcgcagccaggcacggtggttcatgcctgtaatcccagcactttgggaggctaaggctggtggatcacctgaggccaggagttcgagaccagcctggccaacatggcgaaaccctgtctctataaaaatataaaaattagccaggcgtggtggtggacgcccgtattcccagctacccaggaggctgaagcagcagaatcgcttgaacccaggaggcagaggttgcagtgagccgagatcacgccattgcactccagcctgggtgacagagtgagactctgtctcaaaaataaataaataaataaataaataaataaataaataaataaataaaagtttggactccctaagtgaggagggtagcaggacatggtggaacaaggccagacagagccttcagaactccgtctgattggagggtagacccacgccccagcacgccctgcgcggcctaggaaacagtgtgtgtggccacccacagtgcgggtcccaagaccccgggaaggcatccaaggggaggcactggaggcggagttaggatcagctctgccccactagagcccaaatgcaccatcccaggacccccggggcccttctctgaaaactgacaggacagaaactatctggagagagtctcttttgaatgactcctcttccatgggccttatcgttaatcatacacctttctttggagatgagaaatccaggctgggcacggtggctcacaccagtaatcccagcactttgggaggccaaggcaagaggatagcttgagcccaggagtttgagaccagcctggacaacacagtgagatccctgtctctgcaaaaaattaaaaaattagccggatgtggtaggatgcacctgtagtcccagttactcaggatgctgaggcaggaggatcacctgagcccagcaaatcgaggctgtagtgagccgtgatcatgccactgcacctccagcctgggcgacagagcaagaccccaactcttaaaaatagaaattaaattaaaataaaaaatccacctatgtctgcaccaatctctaccacacaccccagggcagcccaaggcaggccctcttcccactgacttcaccccaggttccagcagaagctccctgcacaccaggccctccagggctcagctgcagaacacgtgggacccacaatcccaggaaggtgaagtctgggccctccaggaaggggcagatgacatgccaatagggttggtaggtgaggctgtttgcagatcattgagcccttctaggagagataggggatcatgtaaactgggtcttattaaatgtagcagcagctgctatttaatgagtgatttttaatgggagataaagacctggatagagactgccaggactctttctgtttcagaaaactgagctccaactggagtgtggaatgcaacaggaaggtagtaaggtccacggaattgaggaatgcagggtgcacctctctcccagcacggctgcatcgcgggagtcagctctcgggatctctgctccggcttgtccccaaatggtgcagagccggctctggccatcctcacagcccgccttgctggggacaaaggagtgccactttcctggtgactctggccaagctcaccatcatgatgcacgcaggtccagccgggacaccgtgcacccttgaccctattactgcagtcaggggccagagtgtcctgattggggaggcctgactcatggttccctgtctgaggttgtgggatgggcccagtgagacaggcgagcaggggcttacctccacacagaaagcccatgacctccctggcacacaggtgagccggcaggctggtccccgttccactctagggaagaatgagagcccagaaaattgtcactgcgccttccttcctgggagactgccttttgtcgtgttgatgaagaggtgtttgcgaggcctattcacgttgctggagagccatctttaggacaggtggtgtccatgccgcctcgggggacgtccctgctccagggtcaccccacagagctgttgatgcccccagcgccctccgacgtgatgaagagcctccaagagcagagcgggccaagcctcagacatgttgtaacagtacgtggaagtcattagcttccattttaatttaagaagcccaattttataaataagagcaaattttcccaggctattatttctaattacgcatttacatcaattcacattatgcggttgatgaaatgttaataccaaaggcaattttctgctgatgggtggcatggagaggagtttcttcacatcacaagtcaatatttttgggaataattatccagttgctcaccagagtctgcactgactaacctaatggctgtgtctacacagtccctaacttgaggcgctaagaggggaaatgctccaatggggagagaaggtggaggagaccaagatcacgctgaggggggaccctggacagctctgatgtggcctctcctggctggtgggacaggctcagaatcaactgcactgtggaccagcatcacgtcttttgattattttacaaaatggctctagaacttagactttcatgtgcaaggtgagaatggtgatagtaactttcttatagggtaagttaatatatgtatgccttcattcacttgttaatctaagaaacacttaattgcacacctcctctctgtcaggtacacagtaggtactcaataagtgatagtgcatggaatactatgcagccataaaaaagaatgaaattgtgtcctttgcagcaacgtggatgcagctggaggctatatcctaagggaattaacaccaaaacagaaaaccaaataccacatattctcacttacaagtgggaggtaaacaccaggtacacatggacatggagatgggatcaacagacactgggatctacaagagggtgggcagtgtgtgttgaaaaaccacctatcaggtactatgttcactgtttgggttaaggggtcatcagaagcccaaacctcagtatcactcaatatacccatgtgacaaacccgcatgtgtcccccaaatctgaaataaattttaaaagaataaaacaaatggaagtgatgactctgaggaggaggaggcacagacatcctggcagagtgagcccgtgggaacctcctgggtctgggtggcatctcagagttgaacggcaccacggcaacagaggcagagaaatcacagacatctgtctgcagatacagcccaagccctgaaggacacagtcagaaggatgtgtcgttcagtgcaggagagcccctccaactgctcacagagcctcttctatgaggaagcgcagtactaggtgtcagggcatgggagaggcaacaggggccgggacgaggctggaggctgaggcggtgaagagaaatagacagatctgagagctgtcccaaaggtaacagcccagatctcagcaataggccgcagagggtagggagggaaaggcatcagggatccctcatgttgggctatgtgggtgtcaggccaattaccaagacaaaaaacagaagcaactaccaggctcatagtagaccagcctcaagcccctgctgagagcctggcttgcgaaggaaaatcaccagcttcatatgaacactgtgaagttcccttgtgacatctccatggaagcccaccaagataaaggaccacctccatctggagctagagaagagggcacggcactgagctgtggggaacccctacactctggggtttgacaaaggcggccaccagaaaacttacaaggagacggagatgtgtggccagagtcactagaggaaagtaaagagatctggtcacagaaacccagagcttcagaaagcagagctcagcctaataagctagaaagtcaagatgaggactaacacgtgcacctcgaatttgagaacacgccagcactgaggcacctcagcaggagccaattccgggacagggtggcctggaagtccacgcagaagacacacttgtccaggaggcagggaggccttgctgtgcagggaaggaagatgggtggtggcccctgtaggcctgtgcaggaagacctgggaatggggcaagccctttgtcctctccagcctgggaccctcaagcccaggagtgaggagctaagtaggcagtggcagggacctcagggctggggctccagctacttcttcttgcgtcgagctcggtttcttgtctgtaaaaaggagaggaattctaggcacagcattggcatgagggtgaaaggagagcacagaacctgacttgcagaggtgcacagccctcccaggcagagcaacgcacaaacgcctccctgcagccagcaccacctgccagatgcttccctgtgaccagcaccatccgcgattattcctgggctcaaatgctccagtgccaggcacaggtgagagggtaacttagatacaggactgaaaaaaaggccaaattcaggggtaacatcctcacccaaacttgaaatagattaaaaactcaggtgagtttgcgaacccatggggaacatagctcacaggcacttcaagtctcacaagcatccccacagctggcatgagggtgcccaactctcccccgtcctctatcactgtccccacaggtatttttttgagacagggtctcactctgtcatccagatggaatgcagtggtgcaatcatagctcactacagcctccacctcccaggctcaagtgatcctcttgtctcagcttcctgagtagctgggaccacaggcacgcaccaccatacccagctaattttctgtattttttggtagagacagggtcttgccatgttgcccaaactggtctcaaccccctgggctcaagcaatctgcctaccttaacctcccaaagtgttgggattacaggtgtcagccactgcacttggcctgtcaccacaggttttaataaggctgagaggagagtgggcaaggacacacctcagaccctctggttggatgccacaccaaagtatcctgcccagggagccacagctggggctggacagaggaggcctagagccccatgcaggctgaacagaggtggcaagctgggccctcacatcagcctgcagacccagcagcgtttatttttgcagtagaaccaacatataacaattagattttacataaaaatctgggtttccagcttcatctgaaacactggggcagctggccacgcagggcttgctctccacagggcagccacaggccagagcccagcagctcccaccccaggaatgcgggagggcaatgtggctccaggccctgccaatccccagcatctcaggcccgccccccaacaccccattccatgtctgcctgtcccctgcaggcccctccacccatttccctgcttgtcctcctgccccttatggcctacaaatccacatgctgggccccaagcctctgagagctctcggacgccaccttccaggcagcaggggagggaaagaagccctggggctgcacgggcagggggtcccctcttctgcggctagggcaagtcctggggagcaggtctttctggccaccccaagcctgcctggcgtggaggggaagggtcaccatccactctgccctcaagagcagcccagcaagggaaggaggactgttctgagaaatgaggaagaaagggaagtcgggcccagaattgtgaccccaggagggaaagtgtgcccttagaagaaagcaggatggggcagggtgtggtggctcacacctgtaatcccagtaatttgggaggccgaggtgggtggatcacctgaggtcaagagtttgagaccagcctggccaacatggtgcaaccctgtcgctactaaaaatataaaaattagctgggtatggtggtgcatgcctgtaatcccaactactcaggaggctgagtaaggcaggagaatcgctcgaactcaggaggtggaggttgcagtgagccaagatcgtgccactgcatgcctgggcgacaaagtgagactccatctcaaaaaaaaagaaaaagaaaaaaagaaaagaaaagaaagcaggaggaggaggtgagaggaaggatgggaggtggagggaggaaaagagaaggagactgggaatgaggaggaaggagagtggggacgaggagaaatgagagggggaatgaggaggaaggagagtggggatgaggagaaaggagaggggggatgaggaggaagaagaggggaaataaggagaacagcggggatgaggagaaaggagggggatgaggaggaagaagagcgaggatgagttggaaggagagggaggatgaggaaggagagggggatgaggaggaaggaaaggaggatgaggaggaaggagggggtgatgaggagcaaagagagtgaggatgaggatgaaggagagggaggataaggaggaagaagatagggaatgaggaggaaggagagcaaggatgaggaggaaggaggggagaaaaggaggaaggaaagggggatgaagaggaagaagagggagggtgaggaggaaggagaaagaggatgaagaggaaggacagggagtatgagggcgaaggaggggggatgaggaggaagtagggaggatgagtaggacggaggaggtatgaggaagaaggagatggggatgagggggaaggaggggggatgcggaggaaggggggatgaaaaggaaggagaagggggatgaggaggaaggagaggaaggatgaggaggaaggagagggagtataaggaggaaggagagggaagatgaggaggaaggagagggggatgaggaggaaggtgagggagtataagaaggagagggaagatgaggaggaaggagagggggatgaggaggaaggagaacaaggatgaggaggaaggaggggggataaggaggaaggaaagaaggaatgaggaggaagaagaggggtgtaaggagaaagggggggatgaggaggaaggaggggggatcaggaggaagcagagggggatgaggaagaaggagaacaagaatgaggaggaaggaagggggatgaggaggaaggaaagaaggaatgaggaggaagaagaggggtataaggagaaaggagagaggggatgaggaggaaggaggggggatcaggaggaaggagacgggggataaagagggaggagaggggggatgaggaggcaggagacaggaaatgaggatgaaggagatgggggaggaggaggaaggagagagggatgaggaggaaggaaagggtaataagaagaaaggaagtcttggagaaggaggaaggagaggggggatgaggaggaaggagagagggatggtgaggaaggataggaagatgaagagaaaggacagaggggatgaggaagaaggagagggaggatgagaaggaaggagaggggcatgaggaggaagtagaggaaggatgaggaggaaggagaggggagatgagaaggaaggagaggggggatgaggagaaaggagaggggggataaggaggaaggaggggggatgaggaggaaggagagggggatgaggagaaaggagaggggggatgaggaggaaggagaggggggatgaggaggaaagagatagggatgaggaggaaggacaccagggatgagggggaaggagtgggggatgaggaggaaggagagggggatgagaagaaaggagacaggggatgaggaggaaggaaagggggaataggaggaagatgaacagggatgaggagaaaaaaggggagatgaggaggaaggagagcggagatgagaaggaagaagaagggggatgaggaggaagtagagggggcatgaggaggaagaaggggggatgaggaggaagaagagggggtataaggagaaaggaggggtggatgaggaggaagaagagggggatgaggaggaaggagggggatgaggaggataaggaggaaggagaggggtatgaggaggaaggagggggatgaggaggataaggaggaaggagaggggtatgaggaggaaggagagaggggatgaggaggaaggagacaggagatgaggaggaaggagagggggatgaggacgaaggaggggggatgaggaggaaggaggggggatgaggaggaaggaggggggatgaggaggaaggaggggggatgaggaggaaggaggggagatgaggaggaaggagaggggcgatgtgtaggaaggagatggggggatgaggaggaaagagaaggagggatgagaaagaaggaggggggattaggaggaaggagaggggcaatcaggaggaaggagacaggggatgaggaagaagggagggtatgaggaagaaggagagggggatgaggagaaaggagaggggtgatgaggaggaaggaaggagagatgagggggaaggagagggggatgaggaggaaggagaggggtgatgaggaggaagaagagggaggataaggaggaaggagaggtgtaatgagggggaaggagagggaagatgaggaggaaggagagggggatgaagaggaaggaaaggggggacgtggagaaaggagagaggggatgaggaagaaggaggagggatgaggaggaaggagaggggggatgaggaagaaggagagggggtatgaggaggaaggagatggggggatgagtagtaaggagatggggggatgagggggaaggaggggggatgagggggaaggaggggggatgaggaggaaggaggggggatgagggggaaggaggggggatgaggaggaaggaggggggatgagtaggaaggagatgggggatgagggggaaggaggggggatgaggaggaaggagatgggggattaggaggaaggagaggggggatcaggaggaaggagacaggggatgaggaagaaggagggggggatgaggaggaaggagaggtgtgatgaggaggaaggagagggaagatgaggaaggagaggaggatgaggaggaaggaaagggggatgaggaggaaggagaggggatgaggaaggagagggcagatgaagaggaaggaggggggatgagtaggaaggggaggggttatgaggaggaagagagggatgagtaggaaggagatggggggatgaggaggaaggagagggggaatcaggaggaaggagacagggtatgaggaagaaggagagggggacatgaggaagacagagagtgaggatgaggaggaaggagacggtctcttccaagagcaaggtctccactttcctgttgcctcacacggactgccggcctcttggctggaacacaccttgctgccttttccctacacacacacattctgtatacatacataccgcctgcacacactctgggcatgtcattatacacactgtgtcatctgctcacatcagctgtcactcctctatgccagcagacattatttgtgtgtgtgcacgcacacacacacacacaggggactccccatctgcacacacgctctctgtctgcacacaataggcatgccatccacacacgggtatactgtccgcatacaagtgtgtgcacacacatacacatcctctctgcatacctgctgtctgtgtcctgaggtcacacccctgggaccccagcacctagaagagttaggggacacatagccatgggaaagggtggtgcttgaggctgagacccaggggtggccaacctctgggtggccaacctctgggtccctccccaggcccagagacagggaggcaggtgtgggggaactatgcccctaccgaccctccaggcacactccaggtgtgggggaactctagcccctgccaaccctccaggtgcacttgccgctccctttctcatctctcaccaggcctcccccagctctgtcactcatcccctgcccctctgtcccctcagcctgctcaccctagtatctctctgcccatcccccagccaaaagggctctggaagccacggtgtagaccgatggcaccactgcaatcacacgggaccaacccttccacagcaaagaagtgagagctctgagcccagcaaggcctggtcctccatccaggtgtgccccccaccacccacctccaagccagcaccaggcctttcacacagcaggcactccctagagactcgccaagctggataaaacctctagataccacttgtctaaagtggcatgggaccagctcaaaacttgacaaagaatcttgcacccattatcccccctcaccggccccgggtcctggaaggagccggacagcgagtggcacttgctggtgagtacagagagcccagccggagagaggagggaaagggggattagggggcacaagccagtgtggcccggcgccggggctctccccagacagagaatctcaatcaatagggctttttatttttattttgaaatggaaaaatgacattttgcaacattaccgtgaaaaattaagctagatctgaagcatcacagatgttttgcaaataaaaccagggctttctgtggctggtgattgctgaatttaaacccgcaggtaccctggcccagccagcaggccccgggggagcagtctgtgtccacctgaccctgcgcttctggggaagcgtggtctgcctacagagcctagggggacagcagccacatgtacacgaggccaggcagccccagctccccaggcacggtgaccttttgccaacttcggaccggaacacaaatctaccatcactctatatcggctttgattggatcaaaatcccatcggaaaacagggggaaaggcaataaaacctccagaattgatattaaaccactgacatttcacaaaccgcgcagcgctggcagctgccagtctatcagcaggagggactcgaaggggacaagtcaggcatgaaggtcacggcagtaccacagagctccgcccaggccccacgtcagcaccaaggggagaaagggcctagatggccacagcccccccaggaccaccccatccctctgcacctggttggtccatttgccacatgtgctctctgcagtgggggaatgaactgacctctgaagccaaagatgatgtcaaatccggaggttgtgactgtcctcaaaccccagtactgtgcctactgcagtcccacagtgcagaggccaccacctaggatgagaccaggacagaccaaggttcctctgagagaacagcttgggcctgaggccccaccagaagatgtgaaatggcctcagcttcctgcagcccagcacccactgacccctgccatgtgccaggcaaggtgactaggcaggtacgaggatgaccagagcacagctcctgccctggaagggctcagagcatgcatctttttttccaggtaaccccacctgggcagaagctgggagtgggctgaaatgagaccctgccaggtcccagccccctccccgagcacaccgcctctcacatggacattgggcctcccagagcccatcaactctggcacagacttgcatgcgcatagagccagccctgtgctggccttcgagggacagtgcaagaagccgttagctccctccagtactcagggagacccagaaagccactctagaggtagcgaatcctgccacctcccccagcccccaagccctcagcagacatcgcaacatggtacactctcctgctaagcccaggtgcagcctcagactctgggagctggcctgagatgaaagcaggtctagggccttcctgaaataagagcttaaagccagacacgagggcagttcttcatgtagggacaaaaacaagggcagtccaacatgttaggaggaagcaagcaggaggaagtcttcctggaggaggagagactgcagctggccagagtctgccaggaaagctgtgtgaacaggcaggcaagcaggtgcagacctgagccaggctggcaaccacgagggttgtgaagtgggacggagtccacatcctgtgccctaccgtggagccccaggtggggccctagaccttcaggggccactcagcccaggacagtgttggtgggatggaggatcctctgcttcccccacccttcagagccaccccagggcacagaggcgagccaccaagagccaggaaactcctgtgtccacagtgtcaccagctggccccaggacccattctcagggatgctctggtcagaagcctctagatggtggcccaggaagatggagaagggatgccagaaccttgggggtttggatcagaagccacactttagtgtgactggcatttcccgagccactcgggatccagaaattcaggggacacagaaacatgaacattgacctgagtgcaccccatgacaatttgcaaagctacttcctgggcatcagctggtggacctcacagcagccctgggagcagggaaggaacccagtgccctctgagcagagggtccaaggctcggtgtggtggagagactcagcacagatccaacagtggcagtgtctgcatccaggctttgaccaccccttcactgcctccattgcaccgtgctccccgccctgtgttcctgcttccctgacgacatcagaccaaccctgcaggaggttggtcagtcacaggggaccaaggctggcaggacccagcactgggaagctgccacagatgccccaggcccccatagcatctccactggaaccattaaaaggcatcctgccagcaggtagccttctccatgggtctggagagcacaagggagccagggccctgaccctctggccgacccttggtcatgacgagctggctccatgatttctaatcaccagccttgccattaaggtgaaggaagcgcacggggaaatagcagattttatctccaacagatcgatctgctgagatccatctggccccagcctcttaattctccataatgtcaaagcaattttttgttaagtatacagtctgtcctctactaaattaaactaatagatctagtgggaaataaaaccccaagtgtattgagaatattaaaaataaaaaaaataaactcttcatgggtctataagatttatcttggcaaatgattaaataacacacacacacacacacacacacacacacaggggctgtaataaaatcaatttgggggtgctcagctccaccagtcacctccaagttctggccattcctctcctcttagtaacaccacccctcttaagcacctgggttcaaaagtggctgggctatgccctcaaataccccatgctacatcctcacatcaccaaagctagcaaggcgtatgcaccaacatgtggactgttgctgttagggccacaccccaggtgctgactgactggctctcaaaaccaatccccccattcacccactgcaggcagcaatgccagtacacccattttacagatgagaaaaacgaagctctgcaaggccaaggcaaagccaggatctgagccaacgtccatcagactccatagccctggaccccactctgcttcgttctgctttgctttgttttgctttttacttaattgtctatttggccatacacagcccaggccgtgaggcaggatcttgctttgatgacactcatcagagacagcgtctgggctttccctatagaacacagaggctggcacccaagggagggcagaggaaccaggaagggtggggcgaggcaggctggccctgggacttgggcacaggggcctgctctgaaacccacccaccttcactgcaccagatgcactgctgtttgctggggccagatctgcaggcaaagggggtggccagcagaggaaggtgggaggtgaggacacattaaatggtctctcctcagagccaggacccaataaggaggggtctgtggcaaccacgtggcttctgccctcagctcccagccaccgcccctctaggggatggcagtttcccagctcccactgccccctatgctgccatcagggtcagaactcctccttgtcaccaagtccaaagccttaccctgtcctgtcccccaatgccacttctgctgatcctgctttcttggagttttctctttgtcccagtgaagtccccagatctcctgcctgtacccccttgcataggcagctgcttgtctgggatgccgatgtaccctaaccccttcccacctagctcagccagattctactctgcacttaggcggaactcaggaagcctccccaggcaggacccactgctcacctcttcaggtggcccctgccagggctgggatcactatgtgcttagcttgattccccacgaggctctgagcctcatagccagggccacatcttgcttagctctgagccccgctcttctgggcacaggaatccttgatgtggctgcaaagccccagcttcccttgtcctgcctcctgtcccaccaagcccccctcgctcacaagccatgctctacccccatgtctcctcccatgggcttggcactcgtgtgtcctctgccaaaagcactcttccttccccaggtctgcctggctgacagccccagaccttcccccaccaccaaaattcccactacgtgcgggtgtgcaccgagcactgggtgaaatatcagacttagtttttgtttcttctctgggggtctgtctccacccgctcccgggtgcaaatccgaattccctgcaggcaggaagcctgtgtgtcttgcttatggcagcatcccctgcaccagcatatcatgagacacatgctagataaatgatcagtcttcgggacatgttggctggaaaaatgtctggggtgaaacaggccctgcctggagtttctcctgtggtgttcaccttctctagaccatccccaaacccaactgatcctgcctgtgacaaggaagcaaacagcccaaggctctgaagatgcagtgtgatggcaccgatgcagcaatgtcaggccagaccctggggcctggcagctgtgagtcctcttgctgctgctggccaacccctggctgaccacgagcaggcctgctttgccaagtgcgagcgcacacgggaaagggcaggctgcctccctgatggccctggtgacagcagggggccctctcttgtctccatgcaatgcagggactggcacctgctaccctcctcctggaactcagcactccaagttgctgaggacgtggggcaagcaagggccccaggaacccaaaatgtgagccgtttcacttgcccctccttccgtcttaggggcatcaatcactgcttccctctccagcagtacccagcagtccctgtcagggtccaggcagggccaggcctccacccctcgatgacctgatgtgtgcccttggaggggcgtcttcctgggaccggacttcaggccattatccctgacactggtggcgtgtgaatgactaaactggccaaaaataaaagcccccataaatctcctattttcctataagctgtcgggtacacagagtgtgctgggattattgatagaaaactttatggatgggctgcatcttaaaatcaaaatacattacccaaaatcaatgttgccgtacatggtacagggaggacaagaaaggtcatccgagacaagaatactgaaacccaactccaagaggacctgagcattaaaataaataaattttgaaagtgagttccaggaaaaacactcacttagggctgtaatttaagggtgctttcacaagaggctgggcagtctttttaaatagcgctttttaaagtgcctctgagagtccagtgaatccatccacaaaatggtattgacaagcaccccagctcacagccctataataacagctcatgataggtaatgagtgagagccccgaggctgggcacacagtagccaggccctggcagaagcaagccccccgggcacagccaactgggcagggcagccaacccatggccccatcaaccacattacaagaggatctgcctccaggtctctgtgcacagcgaccccacaggcattttatagctgtggatggagggaggggaaaaccgtgttagttcccattgatgattaatcaggactagaaacaaaatgatcatgaaatactctcaagtccatagcttcacataaccacgattcactgcaaacaggtcatctttgtaggagcccaagagataccacagtaggtagacctgaatggctgtgtccgcagagcttagtgtccctttgggagaagtgacacgcatgctcctccccagccaccttctttagagtctccaactgagagaccacatcccaccaggacttagtgagaaggaaatggctcccctgcagggagtggggagccaggcttggcagagactggcagggaaggaacccagtgccctctgactggcaggagctgcagtctggtcttagctcactaatcctccaactagccaaagggctaagtcgaagagacaaaatccctgccctgctcacagaaaacccacagcaaaagggaggcaaagtgctcctagcagggttccctgtccgaatatttgctaggctctaactatgggcaggcccagctgggagttaaagacacagagaaagccagtgtggtggctcactcctataatcccagtgctttgggaggcagaggcaggaggactgtttgaggccaggagtttgagaccagcctgcacaacacagcaagaccccatctctacaaaaaatattaaaaataaaacattagctgggtatggtggcgcatgcctgtagtcctagctacttagaaggctgagacaggaagatggcttgagcccaggggttcaagaccaacctgggcaacacagcaagacctcacctctacaaaaaattttaaacaaaattagccaggtatagtggtgcatggctgcagtcctagctacttggaaggctgaggcagaaggatcgcttgagcccaggcattcaagaccagcctgggcaacagcaagaccccatctctacaaaaaacattttaaaaattagctgggtatggtggcgcatgcctgtagtctcagctacttagaaggctgagacacgaagatggcttgagcccaggggttcaagaccaacctgggcaacagagcaagaactcacctctacaaaaattttaagcacaaaattagccaagtgtgatggtgcatgcctgtagtcctagctacttggaaggctgaggcagaaggatcgcttgagcccaggggttcaagaccagcctaggcaacatagcaacaccccatctctacaaaaaaaatatatatatattagcaaggcatggtgggctaatcctcctggtgtcagcatgataactctggaggctgaggtgcttgagctcaggacgttgaggtgcagtgagctaagatcgtgccactgcactccagcctggacaacagaaaaagaccgtgtcaaaaaaaaaaaaaaaaaaaaccatagtgaaggtgggtcagctgctctcatcacagtctacaaggcagggcagaaaacagatagaccaagctgaacagacaggaaagagactacaagtctagctcaggctgctccttgctcccatcagtcaagggtagggccttgctctccacaccaactcgaggcatcaggaccaggggctcacctggaggagggaagagcttagtgttttggttaagatccaggaccccagagtaagacaggctttgggttgatgcgtcactcagccacttactaactatgtgaccttgggcaagttccgtaagcttctgagcttcaaccataaaatggagtgaaatcaccatgtctacccctggagttgtgattgaggtaaaatgagctcattcattcattccacaagtatttactgagctcctactctgtgcccgaccctgttgtaggcgctagagatacatcagtgaacaaggcaggcacagtcttagagacctgcaacaagacactcaataaataaggatgtggtcccatgtgttggaagatggctggcgaaatggaaaaaataaaggaagcagagtgagggcctgggagtgctgggtggtgggaggagaggcagtgtagactgcagtgttaaatatggtggcccaggtgggcctcatggagaaggtgactgcttgacaaaaaccagagcacaacggagttagccaagcaagtatctgtgggagaagcatgtcaaccagatggtgcggctggtgcaagggccctggggtagaagcatgcccagtgtgctgcattgtaggaaggagaacagtgtggctaggggagtgtgagctatggagaagacagaaaagatgagaagatgaaggaaaagggtgagcaggaagcagaaaggcagatggtttgaccttggcagccactgcaaggccactggtgtttatgccaagtgaaatgggagccactgtggggtttttcagcagtggaagagggatctgatttccctgagaaggatctctttgtcatgttgagaactgatgcctagaaagtgtctagtacatggaaagcatgtgaaaacatgtatctgtcgctcttagagtaataccaactcatgcagtgggcaagaaacacccaaccccacaaggcggtacagggataaattacttccagataattccctctagctacagggattctcccacgggcatcgctggtctccagcattagcctctgcttggatctggcatcaggaaaggagactgctacctctccaggtgggccactgcgcagtgggctagctctttcttcagaaccctgcttggaatcagtccccaaatgagcctgctttcctggaaccccgctgtggtcctgaatctgcatagagcggtgcaagtctgccctctcccttcagaagctgaggacagcaatggggcctggcagggtcttacattcgggggtccaaagtggtttctaagggcacatgggatttcctaggaaaagctcctgccatgacagaaggagctggcaactgcctctgtggagcccctagagaggaacttgagggaaaggaggaaagtcctataggacccccttcttccctttgcccccagcaggagaccttagaaaacaagggcttgatagatgagccacagtgagccagggggtgggagtgactcctgggccatagacgaggaaactgaaaggcaggcactggaggcaagaagggctggccccgggcacccgctggcgaggacagccttggagagggcctgcagctcctcccctctgagctgtgctgcgctggccgcctggaccagggtggctgctggagagtgttttccctctgggtttccttctccttggctcccagggaatcctctggcggtgcctccgggaggctggtagccggggaagcaggcacgtgaatccaccgggctgccccaccccaacctgaggtcagagctgaggcgtaggggccggggtaggggcagaggtgccgaaacgcactagctggggactcccgggggaaggagataggagagacccaaggcgagccttaggactcgcccctatgactatgactacgcgctgcgtccgaaccacatgtccaccccgcatttgccttcggggaccagaccgcgctccctcagatggctggggagggagcagactccgggtgaaggctgggggaggtaccgggatgccgagtacgccagagcaggcgggggatgggttccggcttcctgccgcctcggcatctcgctttgcaccgggcaaagaaggggccacgaccggcgaagagcgcgtggagacacagggacccgcgatccaggggcaggaaccccgccccctcccggaaacctcccgggccctgagtcgtgcccggcgctccccaccccaccccacccccgccgcccctgccgtcactcacggccgctgcgggctggctagcgtgtgcgctctccgcgccgcaggcacctgctcgctgggcgctgtgcgctcacttctccctcgcgcactgcagactcccggcgctgccgccgccacccagcgtagtctccggctgggcacagcgttccgcccttctcgcggccccgggcgcccacccatccgtcatggcccaggcctgggccaaacagcggggcagctggttgcccaaactggggtaaggagttgagggctgggagctgcagagaggaccgagggacacacggggagcagggatgagcggccgtctcgagccgtgcagactgggaagaagccagggagagtttgggtgggaggactcccaacccaagcgggtgcggggcggggctgtactccaaccagaaagacggtggtccctccgagcgacccccgaggagagagggggagcgctctggggcgggggcggggcgggctgtggcaggagaggggagggcgggggcgatgcagcggtggaggcggcttggcgcccagccactgaccgccccctcccttcccctcccctccccctctccccgcctctctccggctccgggtccgccacgccggacccgctctccccgcgctgcgctgggtcggacgccaggtctgcgcgccgcggctgagcgcccactcgccctgcggaaagagccgcggaggaaccggcgggggcggctgcgggagccgaaggaggtggcaatcgggagcagaaccagaaggagacagggaggcagaagctcgcggctccgtggcacgcactccctcggccagggatgggtcccggcgcggcccagcccctgcccggcccgccgggcagagactgaaccgcggatccccaccgtcctgtggacgaccggacagagagaggcactgaccgatcgccagcagcctcccggtgggaccgcgtctcctgcacaccccgcgcagcgccccccgccggagccgcaccgggcaagccggcgagggagcggggctgattggcggccgccggcggccaggggagggggcgccgcgcggggccatggcaggctcggaggcgtcctagcccgagccggagccgatccgagcccacgcggccgccgcctctccgctcccgggcccccgccgccaccgcgccccccgcgggagatggaacagcggaaccggctcggtgccctcggatacctgccgcctctgctgctgcatgccctgctgctcttcgtggccgacggtgagcgcgggaactttgctgccgctgtggactcgggggggtctttgctggggccgccaccgagaagaagaagaaagagaacgaaccgggaagcttcgcggtctccagcaatcccgctgtgcagcctgggcccggaggggtagggagaggcgagcggcgaagggtcgccgcagcagcagcgccgcgcccgagtcgttcccagtcccgccggggccccggctgcggaaaggatgcctgcggggagcgggagtaggcgcgccccagccaggctctggcggtgcggccaggggcgggggagaagcacgagtcgcccctgccgccccgccccatccggagggaagcagtaggcagccgatggccggtccctgcctcggccctgcagccgcttccccgaactttgctagcccctccggccgtgcgccagggagcagctgcggggtggggggcacaaggccagccagccagagaccgactgcctcgctttaggttgccccaggcccccgacctacagctggtcacgcctctctctctctccccacccccagctgcattcacagaagtccccaaagatgtgacagtacgggagggagacgacatcgaaatgccctgcgcgttccgggccagcggagccacctcgtattcgctggagattcagtggtggtacctcaaggagccaccccgggagctgctgcacgagctggcgctcagcgtgccgggcgcccggagcaaggtaacccgccgcccacgcggtaccggcgcgcgcccggctcgcgcccggggcggcgaaggctaacccagggagggaagcagcgggcttcactcgcgcagggcgccgccctgtggcgcagcccatcttccaccttcgcatcccaaagcatcttcaaagtcagcagtggttacccccaaacctgtcaattattttgacagcatcgctgttcccaccacctcccagaactccattcacgcccagcccctaaagagccacacctcagcctggtcgcttgctcgtgctcgctggctgcggccctctgatgggtgctgggtagtgaaggaagcccccttggtcccatcaggctctccccgccctctgccactttgaggaccccagggctcccacggctgcgttccagaggccaccagaaaaccgagtaccggaaagccggcaggacctccagccctcaggggcacagaggggccacttctctgtggccgaaaacaggcccacgctgcctgtctgcctcaaaacccacactctcttacacactctagtgtgctcgcgtgcacacacacctacacacacacctacacctacacacacctacattctcccagggtcccacccagagttactcccactgagcctcccgctgggtgctgtccagacacagcggccctccctccagttcttcacggctcccagtgagctgggggaggattttgagccacgcggcagggcctaaggatgcccagagggaaggagaggggctttccttcccaccctggtgtccatccagtctccccagttcagccggcaggtgtgcaccagggcagccacccgttggtcaggcaccatgctagctccaaagcccgcttcctcctgggaaactcttggaaagccggacgtcctttgtgccctcaacccccatcccccgggcggtttcggtcctagcctgccggaggagggtgcccttgcctaaaggcggatccgagttcccctagccagaaggccgcgagcctcacgtctctctctccctctttgcattttaggtaacaaataaggatgcaactaaaatcagcgtaagtgtggagcccagcgcgggccgcgggagaccccttctggccgcctcgggtcccgcagctccctcccttagcaagccgcggcggccgcgcatgtggggccgcgcaagtagggcagcgatcgcagccttgcatcggtggctgctcggcgtgtccgggcgccatctgtcgccggttgcagggtcgggttctcttttgtgtaaatcaagggtccaaggcttgagtcccctaattcggctcggcgctgacctgtaaaactccccttggtcggactgcgcgcttagggcctctcgcgcctgccagcctccgctctgcgggcattcctcctagcaccgggagcgcgcggctgctcgccctcgccgcgaccgtggcgccagcttcccgccccctctgccccgccctgagcatctgctctgcgccctccgctgcaaccctttatcctccgcctggattgcgggtctgggtgcggggtgttgcaggcttgcaggggacggggtagggggtggttgtgccaggctgcgaggggcccgggtcatggggttgctaactctgggaggagatgcgcccaagcttcccacctggagcgtagaaaggcctggagatgacgaagcctcctcgtgggctcggttcagaggtgagggctccctgggtgtttgttgagagccgtagagcagtacttcccgaagtccccaccggggcgcaggggaggagcacttcgctggggggcttctggagatcccgcggaaaggcgggttggtagcaggtggccagggagccaggcagcagcctcagcgttgcttgccttcttaagaaagcacagtgttagctgtaaagggcggggtccggtgacagggtggctttccttaggaagcgattcgggcaggccctccgtgctccgggaggtgaggagggccggctggggcgggactgtcggttggagcgcgtcggggcgggaaagacgtggggaagttaaggaacaaggaatccagcctggggtttcctgaaggtgcaggagggaggaaggagaggtggactctgcccttctgaagcgccagctacgggaagacaagcagtgttggtttgtatgggcggggcagatgcaaggtgggcgtttggttaacgtgatggggacgtggggacacagtccaaagagctggctgcctggcgtccacgcagagttggaagccctatgccactgggtagacgcgggtgaaagggaagccggatcgtgatggtgggcaaaccaggatccgggaagtgttggggtgcgcggatgagggggcgcgacggccagggtggccagaagagtaggtttgggagctgcccagcccggcctctaaccctgctctcttgcagaccgtacgcgtccagggcaatgacatctcacaccggcttcggctgtctgccgtgcggctgcaggacgagggcgtgtacgagtgccgcgtgtcggactacagcgacgacgacacgcaggagcacaaggcccaggcgatgctgcgcgtgctctcgcgcttcgcgccgcccaacatgcaggccgccgaggccgtgtcccacatccagagcagcggcccgcgtcgccacggcccagccagcgccgccaacgccaacaacgcgggcgccgcgagccgtaccacctccgagcccggccgcggcgacaagagcccgccgcccgggagccctcccgccgccatcgatcccgcagtccccgaggccgcggcagcctcggcggcccacacgcccaccaccacagtcgcggcagctgctgctgcctcgtcagcgtcgccgccatcgggacaggcggtcctgctgcgccagaggcacggctcgggtaagggatcgcggagagggggcgcacgcgcggggatggcgcagggctagggctgcgccgggacgccccggggggctccggacccaggacccgccccctgggcgcatttgcatatgcatactccttcctagttaggtcgggagcgccccccccagggccttcttcccgcggtttctctgtctttactcctggcctctggaagcatttctgatgtgcatttatgaatggaggagggggctgccctgccagctacctcagggtacgctggaggctgtagtgtggggaggcgacctcttttgggtttggagaactggaccctgagggctgagctccgatggtggcaaggggccagtactcagccaccaccggtggtggaaatgagctatccccagatgggggcactggcacctgctggagagcgggaggcggttaaaacttgagttgcgttggtttctattttgtgtgctcgattgaacagactttgtccaagggtgtggaggggcctggctgtgtaacctacgccctctttggctaaatgcaggatggccctaggcagcagctctgcactctgctgtaaatcgcagatcctctccctttggctttggggtgggggcagtaaggactgagccctaagccactgttaggaaggcacccagaggggaaggcttgctttcttagggagctgagaggctgggagaagggattggggatggggggcgggatgtgagaaggcagaaggaggagaaaatgatggcttgactaccccctggtaggcagctctggggcggtaggagccattggcagaggcaggggtgggggcggtggggggcggttatggagggtagaaaggcttgcccagtgtgcccctcctcccaaggcatcccccactctctccccctgctccaagctgggcctcagagcccaccccagtgcctgactgtgagcaggttgctccctcccttggcccctctcctcagtcttgtttgatgcagagtcccacagggagcatctctcctggccacatggccctgggagcctggctttgggtacaggtgcatgtgaaacttcctagatgtgatggagcacattgtcacacccctacagtggtagttctcaaagggtggtcttcctgcaggctcctggactacctgcagaatccgctggggcaggtcttcatgtccttagtgtcaccatctcatcctgcctccctggctaactctcaagccctccgacagttgagcctgcagtctgcctggcacatcagttcagttctgtctctcatttagctctacccactgtagcagccgcctcagtgcgtctcaggctattggcttgatccgaaggcctcatccgtcttggatgccacacaggagcccacaagactgtccctcaggctactggggaaggtagggacctgcaaagagcctccacagcccagctgggaactttccaccctctgcactaagatatcactaggtgctgtgacaaataaaccccaaaaggccagtggcttgacacaattcaaatttaatattcctcgttcatatcaagtcctgccctggagtgccccagggcatgtggcggctctgttccatgcagtcatccagggacccaggctgagagtaccagcctcagcaggaggcttccaaagtcactctgggcatgacatagagccagcagaccagtgaggagagacagaagcagcccttgtcagctcactgccctaagagaattaagccctaatactctcaggcatgcattgtgtatgatgaatcaacttgtttcatatgcatttaggacggccctaagtatgtatcattcttgggagactgagaaaacagccactcaaatctttctggcagcgcttaactctctcagagaaaagctggtttagaaaaatggcaaggcgttttttaagggctaggtctagaagtggtaaatattacttctaccctcttccatcggccagaactcagtcacatggtccaacatggatgtagggcccgctgggaaatgtagtccttggtgtggcggctgctttcgggcctcatctcttcacagtgcaaggggagcgtgactcttcgaggagttagccatctctgttcagcatacaggcagtgctcagggagagttcctattgacttacagagccattggcttaactgatgcttgttggtgaagagaacatccttcttccccctccccttgggccccagcaaggaaatgtgtgcattacaggctgggacgtacctctaggatattcctggaggatttgaaaggcagaagttccgatgtaggttgtgcttccaccacttactggctgtgtgattttaggcaagtgacttaccatctctgagtcatctgtaaaatgaacaggataatctctctgacctcagagggagcttggtatggaaattgctgcacatatatgttcattattatcaccctggtcattagctgcactagctggagaggagaggatgggcagataaagctaaaaggttggcagttggaagccaggctatggagggccttgaatgccaagtggaaccagcagttggttaaagaccggtcaagaccatgtgaaatagatctttgagagtggacttggttgtgctcacaaaatgataatgagaccaaggtcatgagcgcactcctgcttgaatctccctcttcccttggccttcagcctgagtcccaggcccagccacagatgacctgactgcctgccatagccagtctgatctccagtctcggtgctggccatggaggctgaatgagagagtgaagatgctccaggacatctcatccagggaaggtgggccagtcagtgcccttcttcccagaagatatggaggtcctcaggtcaactcaatgctgatggcacagtgcccagtgccatcccagcagataggaccttgggcacccaccagccacggggccatatgttaatgcccatgtgggtcactctgccttccctggaggggctgatgtccactgccatctagaaagcacagcttgcctggatcccagcggggctgacagcagcacccctgggatagaagtacagtggcctctgaggtctctgtcaccccctaacccttgccagctcctgaactggccaggaactgtgtagacacatctcagaaagaacctccagtctctctccaagtctcctttggggtgcccagaaggtgggccttcagctgggaggtcagaaaacctgtgtccctcactctccaggtgaagctctcttgagagtggttctgctccaggcactctatgtcccactctgggcacggaaaatggatggcagacctgtcattcacaaacacatccgaacagccttgatgccaaggagggaaccatgctcagtcttgtgtcccacctcaccccggtcacccaaggccacccaggctgtgtgctgtcaatgtgaagcctgcagactgtgttttggaggatgggcattagtaacctttctgtagggctgcatcaccagccagtgccccgagctcagctgctggcaccaggtactgctgagcgccctgagaggcagcaagccagctgctttgctcggaaccacagcagcctgagctgcagagggagctcggggcagacgaccttgggccttgcctcccagccactcaattctaggcagcttgatggggaggggtccagaaaggaccgctgcctcttggttaatagtcaagagtgtttgcagaggatatcaaccagggtgctggcagaggcacatggaacattcaaacagggtcactgggggggatggaaagagcgtatgtaccaaggtgtggacagggttagggcagccaacaaaggattgatgcaggtccccggggctggcatcagtgggagccatcagcagacctagcctaaaggtctgggggcagctggtagcacccagagagtaggaggggaggcacacagccaacccacagtcacccagcaaggatctcactcctcctgccctccattccctgtctgggcctccctttggccaaaccctcctggaacctgaaggcaggggcacccaggtggtgcaggctgtagaggtcagccctcaggggctcacagcagagtggagaagggtgggctgaggacctgggggcactgaagaggctcatggccaggcacagtggctcacgcctgtaatcacagcactttggaaggccgaggcgggtggatcacctgaggacggaagtttgagaccagcctggccaacatgatgagatcctgtctctactaaaaacacaaaaaattagctgggtgtggtggcaggcacctgtaatcccagatacttgggaggctgaggcaggataataacttgaacctgggaggcggagtttgaagtgagccgagatcgcgccattgcactccagcgtgggcaacaagactgaaactctgtctcaaaaaaaaaaaaagaaagaaagaaagaaaagaaaagaaagaggctcaggacactggccatttcagattggcaacagcaggggcggtcccagtacatctccccaaatagtcccccattaagcgatcgttcctggaaggaagtcagaaaaaaagtccctattttttaagtgagccactttggtaatgccacgaaggagagaggggggacttcctccagccctcatccattagctaccgcacagccaggcaagaaagcccttcccatgccacatgtgtacctaatacacccaaatacatatttgcactaaaagttgatgtgcaaaaactcattcatttcacgtctcatttgtcaagagacattttggtatttgtgcttaaaaataaacatggactgcattagcagagcagagcaggcgcaggaggctgggccccgtcttagctgtgttcataaatctggctcctaattaatctgaatgctgacccatttttcgtgaacactttgttgctggttgccatttctagaaaagagagagagagaccaagcagagtatcttccagactaacacttctaaatggaaaaggcaccgcagtaaagtctagcgcggcctcaaaagaatccagtttgcaactgaatggctggtgtgttggccagaggttcccctctgcagggacgttgggatcagagcagtggcgtgtgaacctctaattagcctcagggctctggctccaaggaaaggcaccatggcccccacagagagccggctggatgtggcaagctgctgctgggtgcccacacggagaactggctctcaatatttcaattaataatgagagaaagacagccaaggccatgggtatgatggctgtagagaggctgtggctgctgggagccgtcaaaggggagcatccgcggatgtcgccatggcaaccgtaaaccgtgaccaaagggggccgtgggcaaggtggagacagtcactacatctcgacccatgccccggtggtgatagagctgaaggaatggcacacacgtgacccaggagaatcgcgatgcagcagagtcaccagcagtaccagcaggcccaggacctgtgggccctgagcaagccattgaggcagccacctggttttcccatctccccggacccacgaggacccaaaggccctcaccttaaatgaacaatccactcttcccccaagttccgatgtgacatgagaattataattaagaagaaaacaaatctggcaagggatgtcccagagaagagagggcgaggctctctgagcatcctgaaaaagaaaattaaaggatttcataaaggaaatggctgagcctcacagctggcaagcaatgcctgcttcatccctaacagcagcaatcttacgccattatcagcgacatggcatcctctcccccagcagccagtcactgggagccttctgggcccagccccacgcttgccataagggggaaccagagatggcagtgtggacccaaacttaaaggagccagggcacccaggtaattccaggacaaagcagtctgtgctgtgccagcactaatccagctgaggcaatcaggagaggcttcctgtaggtggtgtgtgacttacagcttgaaagaagcacctgaggctgaagtcctcccaattaggtcagaccttggaaagctttcagatgccccctctctccttcccaaggttggagaagtccacaccaaatggaatggcctttgtgtatcagtcagctcactgggcaaccatcctctcagcatcagcaagaccctaaattcaggataaaaacagctgctcttggattataataatgataaataataacatttgccttttactgagcacttactgtgtgccacgctctcctctcaccggctttcctccttcccacagttctccctaatgcctcctgcttcagtccgtcccccagaagacagagcgctctctctgtgcttatagccagagcccacactctctgcccagctggagtggtagcccccaagaaaagagctggaagccagccttgttaaatgtcaccgggaactaaccccccaacaaggagctgctcattaaacacgccaggtgcatatccttaaagctctgaatattaaggattccccaagcatccgtggggataaatgaggtcaagtgcttttgtaatatgatattgattagttctgctctgtgtggacagagcaaggccttggctgtggtctaaacccctgagctttctggaagatgccagcatggttttaagacatttttgcagcacaggagaaaaataaaagcattatcttttttattcccccatgcttagctgactatcaccaggcatctcttgtaaacttgtatccagagtggtgagaaggcttcactttgccttacataagggctgcagggaagtttgagatgggaagtcagcaggctcagcccctgtaactcttgattcctgactattcctgatgaagaatgacacacctccttccctggggtcgtgcttctagggaaattagcctgcttgtcagtggctttggtgctctcagggaagatgtgctataaataccaagatggaggatccagtctggcctcctgtgggttagggtgtagctgctgttaaacagccagcggtggaggtggctgcgggggctgcttgcagacagcagcaccctcggtgaccgcaaagtatgagcatagcccaggccccttctcctgcctgcatcctccacaggacggcccttgagagacagaccttgtgcaaagcctgtccctgccagcaatcctgtttctggaagttattggttgttctgttctgtcgttactgctctctgggctaaaatatcaaagctactttggacaggcttcagttggctctggttcttgcagttcaagaggaacgttgaggggtcctggcgttggcatgaaataaggagccaaagtggacatttcggaagcttttccccacaaccacccgcccccacacccacctactctcccgcacccacctactctcccgcacccacctactctcccgcacccatgggccctgctccatgcagctcagaagtaaccagcttgccagaagggccactgagagggacagagcaccccctaaaagtcccagttgagcacccaatgcccgctagagaccgaggccaggaaaattacctaggcagatcagtcctccccacagctgcccatgctggtgggagaaccaaagcatcacccgagggacactgaacatagttccggaggaagttacactcaccaccacttccaaccatcgcattctctcctgacatttcaaatgttcctcactgttcagcatgctggctcacaggtaagccaggatttcaatgccaacaaatttgccccctttctgggcctttacagggctctggccctgcaaaagtcacagcatgtgcttctcactcctgcccttcataccctaagtattatgcttgttttccggatacatccaaccatttgattggaatcttgagtccatcacttcccactctctctgtacgagttccgtcatctgttatcatcagcacgacaccgattcctatgccagagagtggttggcaggatccggggggataatccgtggaaagatgttagcttaacacagggcctggcacctagaatacactcagtggatgttggctttggtaaccagcgttattcacgggaatggtgttaaccatccaggatcgcttactaagctggacagggtgctccgatctgagacttccttcatgagaccgccctccctcctgcaaatgctgtgagcatgatggagctaattgtgattgtattcatccattttgcattgctatcagggaatacctgagtctggtcatttatagagaaaagaggtttatttggctcacagttctgcaggctgtgcaagcaaggcaccagcatctacttggcttctggtgaggcttcaaggagctttaactcaaggcaggggagtagacatgtcacatggtgagagaggaagcaagagagagagggaggatgtgccaggctctttaaacaaccagctgtcatgtgaagtaacagagtaggaactcacccattacctcattaccatgaggagggcaccaggccattcgtgggggatccactcccatgacccagttacctcccaccgggacccacctccaacactggggatcacatttcaacataaggttggaggggatgaacatccaaaccatctcagtgatggggctgatggagctcagaaacagaaagggccatcagattgcaaatggctcggagagttgctgtttttgtaagttctctggctgcaccatttcaaggggggaaggtagaaagatggggatggtgccacatccccatactagtctggttggggctgtttgccataagtcacgagctccttggtgaacaaggacagcttcatcatggtttcgtgtggtccatcagcaaattaaacccccaggtttgcccacgtgccgagtcctggctgtgctaacagggctcctggggaaagctgctccatgtcatgcctggtcgtgcttctttgtcatataggctgctgccagtggcgcgggcactgtgatgtgagggggtagggcctttcgggtggcaaggagaagctcagaggagaggctggtgtttgcagcactggacagctgtgtctccaggggagaagtggggagaaggtagaaagctctctcaccatgtcatatagccagagagcctcctggggtaggtctagactgagaggaggtgcccgaagtccccatcactggggcctttacagagatagagtgagagagagagtgagagccacctatgtcagggagtgccccacagggatgggccttttggggactcacgccaccgttacaggctcaggacatgtgctggttcttccacttgcgttcctgcattttgcttttcatgttcgcatccaccccagcttccctttccgtggctcactgtgcccagagattgctaataaaggtgccacttggcaccgaggctagtgagaagaatgcaggacagagataccacctctgggatgtgctgggagtgtaagcaggctgccggccaggccaggaagccagggcccctcctgcctgtctccacccctcacgcccatgtgagcctgcctccctcccagcacagacagcccactgcagactcctgctggaggcccacccacctgtaatcgtatagctctagagacagagagccttccctctgctgaccctggcctgctgtccatcagctgccctcagggaggaaggcatggttttctttaaggcaggaaagcccagctgcaatgtcagtccccttagagtgacttttattacaattgattctcatacaaatgccgcttggcccagaggaaagatctttaataaacccatggaagggggagctgacatcacatcaggctcagtccgagtggggggtggggattcctggtctgctgtatctggtctggcccaggccaaggggcagggagctacccagagcatcaggcagacctagcccctgccccaggtaggagctcatggtctagttatggtggccatgcaggaggatgaacccagggctcagctcaggcacaagaggggctcagaaatggtgggctaccaggatggactagtagttgggaagaactcagaaaggtggggccagggtgggctggtagttgggagaagacttcctgatcctgcagccaaaggagtttctttcattctgagcacctagatgtgccttgctgctgcctcagggctcccagcagttctttccctgtcctgcagtcaacacctggctgagtgccccatccagactgatgcccacagacagcaggcctggttcattctcactgctgtttccccactgtcctatattcattggacttggtactagttcattcattcattcaatcattcatccagcaaatgtccatggagcatttttttatgtgcaggaacttttctagtcactgagggcataatgtgattaagactaatgaggtcctgagaaagtgacagaggaagagacagatattgatcaaatagtcacatagcaagtggaaattagcagccatggctggtactctaaaggagaggcccatgggctatgggagctaaaatagggagatttgacccagtcagggaagggtcaccaagaaagtgacatttgagccataatcaggaagacagttaagagttggccaggtaaagaaagaaggtagagctttccaggaagagggactcacatgtgcaaaggtcctgcggcaagagggatctggggaaatgcaaaggcctcacagaagcttactgtggtgggtgcagagaaagcaagatggggaagcaaaggggaaattaagtcaaggttagagtttactggtcaaacagggtcaaactgtaaggccttttgaagagatcaggaagctttgactttatcctaagagcagtgggatggggtttgagtggctagggcatgatgccttcagaaatggtcactctggttgcaatgtggagattggagaggtgggatgaatttgatagatggggaagaccacttaggaggcagtgatccagtcaagagatgatggggcttggaatcattggatggatgggttgatggatgtctgaatggggtgataaaaacaagtagctggtgggtgagtgaagggaaggatgtgtgaatggatgggggatgaatgggaggaagaatgaatagatgggtggatgatggaagaatgaatggatggggagaaggaagaatgagtggatgagtggatgaattggagaattaatagatgggtggaaggaaggatgaatggatgggataatgaatggatggaataataaatggatgggataataaatggatgggtggacagaaaatgagtggatgggtagatgggtacatagaagggagaataaatgggtgggtagaaggatgataagttgatgggtagttgggtggatgggtagaaggaaggatgagtgaataggtagatgggtggatggtgggagaattattggatgggtggaaggaaggataaatgaatgggtgaatgagtgggagaatgaatggatgggtagaaggagaatgagtggatgggtagatgggtgggcagatgggagaatgaatgaatggatacaaggatgacgagtggacgggtagatgggtgggtggatgggagaatgaatggatggattcaaggatgatgagtggatgggtagatgggttgatggatgggagaatgaatgggtaggtagaaggatggtgagtagatggtagatgggtgagtggatgggagaacgaatggatgggtagaaggatgatgagtagatggtagatgggtgaatggatgggagaatgaatgggtgggcagaaggattataaatagatgggtagatgggtggatggactggagaatgagtggatgggtagaagaatgataagtagatgggtagatgggtgaatggatgggagaatgaatgcatagatacaaggatgatgagtggatgggtagatgggtggattgatgagagaatgaataggtgggtaagaagaaggatgaattaatgtgtgagtgggtggatggatgggagaacgaatgggtgggtaagaagaagggtgaatcaatgtgtgaatgggtggatggatgggagaatgaatggatggatagaagaatgatgcgtagatgggtagatgggttgatggttgggagaatgaatgggtgagtagaaggaagatgagtggatgggtagataggtagatggatgggagaatgaatgggtgggtggagggatgatgagtggatggatagatgggtgaatggatgggagaatgaatggatggatggatggattgatggatgagtagattgggaatgagtggaaaaataaatagctgacgcataggtggaaagaagatataagtgggtggatgggtgaatggagagtagaaagtaggagaaatgggtaagtaggtaaaacatggatggaaagatgggtagatttgggatacaagttgaggcttgcaggatgggtgggattgggattgcaggcatgcctaaggttggagtttccagcaactgaatactgcacactcatgtcttccaggaaggaggccataggaaaaaagtctccaagtggtggtaggtcccagaattccatgccattccatgcttctgcctgcagtccctaggccactgaacctagacagaggggaagggcagagtgagtggacacagccaatcccagcctgcttccgactcccctaatccctcagcctttagggacaggagcagcggacctcctccctctgctgggcactgggtactctggtggatgcagcctggcccagatttgctgattcttgtccacgtacaaattaatgtagatatgttttttcaggcatttaagaaatcccatctccaggtgggcagataaataactctatttacattaaagactaatgtaacaaaaatacaccaggcaataattcataatgcattctattctacagagtcatattttaatgtgtgacatatcccaggcagctcctctgtgctaatttcatttaatgagcacatgttatagaattttcagagcactatccctgggcaattaaaatatgttaaccttttggttaaattgtgtttctaaagaaaagtcctcactgtgaaacagaaagaaatatccaggtgtcactgaggtggaacccaaaggcggattgtaatgggaaaggactgctgttaggtcctgcatgtgctggctggagggacctacagcctcctcccggacctcaggccatgctgcaccatccctgcccttgcatggccaggcccatttccactgtgcaggacaaggagctgaagcctggacccatacagtgagcagccttccttgagcagtcattaattgactacccactatttgcctgacccaggagatccaaggtacaccctggctccaaggttgggaagattgtagcatggaggtgaggtacccccagacaactggggtttaaatagggctagtataggagacttcaaggaggggcaggctcctctctttcaaaatatggacaggtcccccagctctgccatctacataatgggcacaccagtgctccagcattcccaagtcccagagtttcagatctggaaggggctcttagagagcctagtgtgagtgattcccaaactgtgctccttagaaccccaggagccccaccccaacttcaaccagagccattctgcttctaatggttttacatattggggttccatgaagccattagttgaaaatagggttctactgctttaaaagatttaaaagcagtttatatagttctcctgtgtgtatatatatacctatatatatatatatgcacattatattaaatatatatttatgcactttatattaaatatacaaatagttttcatatatatgctgccttctaagggaagaatttgaagtggcttataaaactgaatgtgcggccgggcgcggtggctcacgcctgtaatcccagcattttgggaggccgaggcaggcggatcacgaggtcaggagatcgagaccatcctggctaacacggtgaaaccccgtctctactgaaaatataaaaaattagccgggcttggtggcgggcacctgtaatcccagctacttgggaggctgaggcaggagaatggcgtgaacccgggaggcggagcttgcagtgagcagagatcgcgccactgcactccagcctgggcgaaagagcgagactctgtctcaaaaaaaaaaaaaaaaaaaaaaaaaaaaaaactgaatgtgccataatagaatgaaaagtttttaatgagcaaattggaataaaaggaaaatgaaggtgaatttgtgaaatcatcttgagaaaaagttagacaaagacatgtgtactggcagtgttgggaagctggaaggtgaggtcaaggtcactcttgcagccctgggctccccagagggaactcgagacaggcctctcagccccagcttgtatctgaaggttaaaaatgcgaggccacctttgaaggacctggcccatgtctggtgcattatggatggttagaccagctgggatgtctaagaaagactttcattcatgcattcaacaaacattttgtgagcctgtcagggttccggcaccgtgctgggtaatgaggacatatgcagctgagacagccatggtctccactctctcaggcacacccgctagcagagaagacaggggtcagacagtaacacactacggccatccacatacagccccgaagaaatggaacttgccttggagcctgtaggacaaagggagcctccagactgggtcagcgagggcccaatgtctgaaggagacccatggtctgaggaggacggaaatgagtgaatgggaggtctccgggggtcggcagggtggattcatgatggcactgggaggcaggcaggggtgcggggagagaggtagccaggcgagaagagttaggtcttcagcctgagacagagactcctgggaacttggggagcaggaggaaattgtgctttgcatgtgaaaagagtactctgggtcgggcacggtggctcacacctgcaatcccagcactttgggaggccgaggcggttagatcacctgaggtcaggagtttgagaccagcctggccaacatggtgaaaccccatctctactaaaaatacaaaaattagctgggcgtgctggcacatgcctgtaaccccagctactcaggaggctgaggcaggagaatgacttgaacctgggaggtggaggttgcagtgagccaaaatcatgccattgcacgccagcctgggcgacaagagtgaaactccatctcaaaaaaagagaagaaaagagcactctgtttctgcaaaggacatggtttggttcttttttatggctgcatagtattccatggtatgtatgcatcacattttctttatccagcccaccgttgatgggcatctgggttggttccatgtgtttgctgttgtgagtcatgagtgctatgatgaacatacaggtgcaggtgtctttttggtagaaccaacctgcacatgtaccccctgattctaaaataaaagttgaaaaaagaaagaaaagaaaagaaaagaaaaacggcactctgggcagccacgttagagtgctgggctatcagtgactggcttgcgggggcttggtggatgcagggaggccagtcaggagctgctgcccccgcccaggtgagagctgatgcagtgagggggagggttggagtgccagggcagggtgggtgtggggtaatggcaggggcaggaagtagatagattcagagctgtattggagtcaacttgtgggggcctctgagatgggccagagaagatgggtgagcttgaaagagccagagaggaacaggaaaggaatctagcaaagggaacagactgagcaaaggcctgaattcaggagagcctgggtgcatgcagcccccagcgcaagagccccatttacctggagctcaagacactcaaaggagtgtggagacaggcaaggcggcactgtccactgggtgaaagggcttccagctggctaaggaacttggactcattcataggtaccaaggagtcactggagataaccttctaccacctacccactgtgtgaccttagtcaagtcacccaacctctctgggcctcacctatgaacgggaaagtggtttctacctcctaaggctgctgagagagataaaggggaaaattctcttgcaggggccgagtgcagctgctggcactgagaattgtgtgcctttttacagcccacaggctcaaaggttagcaatccagatggggcaggggcccctcaggtgaggaatgggccccacactgagggaggcagcctcgccgtccccgctggggagcccccacccccaccccggtgctcactgcagtcgggccgcctgcggccccctctgacagcagctgcctgaccacagagtaaaggcctgtttgccattcacattaagtgacatcattaaagggccattgggggcaagatgttatctcaaaagagatggaaaactggagaggaggtggcggcaaagttggccacattaaaaagccaccatgaatgttaacattcagggaaaaatctcatcccccattctccttcccttgcaagtagccaggggccagggtcaggctgaggcattcatggggaaggagagttccagctctttgggcccgagaggtggtgtgtgtggcagtggttaggtgtacacaggggccagactgcctgggtgcaagtcccagccctgctgtttatctcagtgtggccttggttgggctgccagatttagcaaataaaaatataggaccccccgttaaatttgaatttcagataaaccaccagtaacatcttatgaatgtaagtatgttccatgcaatatttgggacatacttgtactaaaaagtatccattgtttttctgcaattcagattcaatggagtgtcctgttttttatctggcaaccccaggcctggggcaaatcacttcatctccctggacctcagtttccccaactataaaataggagtaaaagtaactcctgccattacaaggattgaatttaacgtaggtcacatacttgctgcagtacctggccctaataagtgctggcaacctttgccttgttatcctaaaggtgctgggttctgtctgcttgactggtctggtccctgacatctgctcttgactagaggtcatcagttgcaacaccaggcaattgccatgtcctggttttgggtggggctgcttgctgggggctgaggagagagggaggccctaggccagccctctgacgcatgggcttcctccacgaccagagaggtaggacatgtgaggaaggcacttagggggtagcagaagagaagaaggcagaggcaaggggcacctaaacaaacagcacagacatttgtgccaagccctctgtgtttgggtgctcagggagggctgcctggaggaggcagcatctagacaaaggaaaagtagggggctagtcgttctgcggggtcagcctggatatgcctgtagggaaccagagcacatggctgcagcaggggaatggtcagattgaagtggggggatggggaattacggacaaaccccaactgcggcactcaggcagtggctctttctcctgtgggcagagggcagtcatcaaaggttctgtttctcagggagagtgtccaggtgcgtctgaaggatggagtggttatgaaggcaggagaatgctgtaggggccactgctgtcattgggcatagtggaggcctgaactggggctgcagcaggggagagagggcacagcagggaatggctaaaacaggcggggaacaggcagtccagccacatttgcccaggagtactcaggctccttccacgtcctggacacggaggcagccatctgggcatcatcaccaagggatatgacgtcacccccaggaggacagcttgtctgcaaacccaggagctgactacccagggcctggaagcgagggacagggcaggaggacctgtgcatgtctcgtctgctctcaaaggtccgcaccccacactggacttttctttaaaatatctcgatttcctttaaagcccaactgcatcagtggccccttgcttctgccccagttacagtacacattaattttatggcagaaactaattctacccgaactccgttagtgttcaattattcctcgctgactgcctttgaataaatatccatgaagaggcttttaataaaacatcaacaagggaggcagcctccttgcaaggtggcagaggttctcaccctgcagcgggctgggccagtgctgcgtccaggggagagctgggagccaggttctcagcagggcctgggagatcccgccagatgctcccagggtggggcaggctcaggagccccatcaggaagccgggaatgtgggagctaggagagccagccccctacatgaaggaaggggtgtgtctggccacacaactgcatggggacaaagataggatgcataccaggcctcctgggtcctgcgccaggcctggcacatagagtgcaaattcaggcacccacaaagggccaggttggctgagcaaaaggggcccaactgcgcaggaggctggggcaggactggcagctcaccctgggcccaggctggtggctagcagggagggatgaggggaaggatttctgctgggaagagcagccggcccccacccaccccagtgttctgtagcttggtggaaaagcagtcctggggttgctgattctggggcctttctaggaaatacctgaatctctgcttttatgtagaagtctcccaatttttacatgccagattataatttacaatttgtaagactctgtgtgcaccaaactagacccttctgcaaatcagacagccctcaggtggccacttggtgcctttaccttgtccctgggctctgtagaagacagcattttgtaaccaggaaatcagggagtggggcaggcagggaaataagaagactgaaaggccaggctctgggggagtcccaacgctgcccccaatgctgcacccatgctgccccaggggagctctagcactggccgcagtgctgccccaggagagcctgatacttcccccagtgctgcctcaacattgccccaggagagccccaacgctgcccccagtgctgccccaggaggtccctgacgctggctccagtactgccccaggagaaccctgatgctggccccaaggctgctctaggagaccccagacactggccccaatgctgccccaggagacccctgatgctggccccaatgctaccccagtagacccctgacgctggcctcagtgctggccctgacacgggccttggcatctggaccatatatgtctccccacagggaaaaggatggggtttgactgtagccaggatggctactagatgccctctcctactctcactccacaagcccctgcaaacccagagaaattccttgtacactggccccaggaagctcggagacggaggctcctccttcagctggggcatggccttctgctgcactcctgagcgggccccagggcaggtgatggggaattgggaagagcaggtctgctcccagctgccccaggcagacagccatccccatggctaaatggatgttcaagtccagcccattaaggccatgattgccccttgggggctgccttcttgtttcattcttagatgacagcaaaagagactagaaataggcttgaacatcagagctgaggggcccctatccaggaccctcagcttggctctctaacctttctagccaagaagcccttgttctgactaaagatctgttataagccaggagtggtggttctgacctataatcccaacactttgggaggccaaggcgggaggatcacttgaggccaggatttgaagagtagcctgggcaacatagcaagattccattattaccaaaaaattttaaaattatctgggcatggtggcatgtgcctgtagtcccagctactcaggaggctgaggcaggagaatcacttgagcctgggagttggctgcagtgagctatgattgcaccactgtactccagcctgggtgacagaatgagaccctgtcaatcaatcagtcaatcaatcaatgtgctatgacagcacaaaatgcagaacagacatgagtggccttgatctgcttgacacagaggagggacctgtctgtgagacctccatggttgtcctcatggtagaatatccaagcttgctgttggaatggctttgtctgaagacgacaatgtcttcccttgaactagctcttctctagtggctgcctgtactcggtgtgtgaatattctatgcaatactggacaaagcaagtgaaagacagaagcactacagcgtcagcctatgaaatgagcctccacttagccaggctgcaagagccagaccagcctgttgtccatttttgtgtgtagagccagacctcaaatgtgtcttcattttacttactcttctcaaacctgaaaaaaaaaaaaagcagcactgtttgcaaacccctgaccccagatgcagctcccaggccaccagcaggtttgcaggggcaagggacctggccaggcccaaaggatctcagccccagtggagagggctgcagctctcttctaagccacggccagaaaacaagggccacagactacagctggggcccatattaccccaaaggcagagggaagccatccatacttctagaaacatgggcagcagtggctgccctggcgagctgtgcaggctggtaagctgggagccccctactgtgatcccaatgcccacagggtaggagtggcccctctgcactccgttccacagcatagaaacagatactccatgccgatggaagtcccagcccatatgggtattcccaacccttctccccactctccaggaagctaactcacaggcttgggcagagcttgggtcagacgatggcctggaggaactttcacctttacttttagcacaaggcatgaaatggcttgagagctgccatattgctttctggcagggatttggaattctgcttttgcttgataaattgaaatgaggaatttcccagacaagctgctgggctggcacctttagtgtgcttatggtggggtggggggcagggggaagtagagatgcccgttgtgttctttgagggtctctttcaaatggctccagcgtgtctcttatcctgctcactatctgaatgataaaaattaatatcttaattgatatcttaatcttgagccaaagaagctttgattcctttaagaagagtgattagcaaaatgatgatacttgcttaatataaggaatgaatcagctactgttccatcagagggcttccctcacctctcaagcagcctgattttgcaccttaatcatgacaaataaacttgctcatgctccagcgctattcctggtactccttaggacaggagggaatagataaagaaaccattagcatccagtcaatgcatcagcctgcatgccagccagcccgctcagcacacaacccccaggaacacagatgtctccacgccatgtaaaaaaagaggctacagggatgggaatgagatcctacctcagtgagcagaacgtaccctctgggccttgccttgtagggtcaatttgggcctgggacctgtcattctggaaagcaatggacagcagaggccaagtgctggacattggaacagacagtgtgatcctgggcaacatccttcacttctgtggatcttgtgtcacatttggaaaaggaggcaatgcctggggagcaggtggacacagggctgcaagactcctgagctctgaaccattgctgatgtacagaccccacttactcagggtcagcctggaagccagacttccttggtctgccccgattcatttgggaaacctagattgtttatatgtctgatgaatcaggtagtaaaaggttgcaaatcctaggtccttcttttgccaaagatccagggatgtctcaaaataagtggttgaggaatcctgcataggcaactggggtaaccaggttctctcactggtactgacgtcgttggcaagacccatggagagcaaggaaaagcagggtggtgcggtggcccacctgggagccgcatggggcaagggaagcacctaccaccagccaagggagtcagtgagtgatcatgctaccttacccaggaaaccatgctatttccacagatctgtgaaacctgtgggtcaggggatctccctcatgagcccgtgccaccagggccttgggtcccaagcacgccactcagctagagactgcctaagactactgagttccggggagaggggcagctgtcatcactgaggctgcctgctgcctaagatggctaagctcccagggggaagggcagcagccatcactgcagttccagtctgctgcttttcccctgccagtactggggagactaggtggtttggacccaggaggaattccccacagtgcagcacagcagctgtggcagatcaaggtcagactgcccctttaggcctgacactgacccatccctcctcacctggtggggcctccctgcaggaatttcagcaactacagccaggcgtatagggacagagctctgatctccctgggactgagcccctcaggggaggggtgtctgcggtcttcacagatcagcagacttagtcttttcccctgctggctctgaggaatctgggcagtctggacaagtgagatcccccccagcatagcacaccccctctgccaaggggtagcaaaagtgtttcattaagcagatcccatgcctgctgaccaagaccccccacaacaggggtcaccatacaggagtgttcatgctggcatcaggttggtgcccttccaggatggagatcccagaggaaggagcaggcagccatctttgctgttctgtagcctccactgatgacacctccaggtatgggagaaaccccagtgaatagggtctggagtggacccccagcaaaccacagaagccctacagaagcggggcctgactgttaaaacaaaagcaaacaaacagaaagcaacaacaacagcatcaaccaaaaaagtccctgcaagaaaaccccatccaaaggccagcagcctcaaagattgaagctacataaactcacaaagatgagaatcaatgaaagaacactgaaaactcagaacgccagagtgcctcttctcctccaaatgattgcaacatctctccaacaagagcacagaatggggcagaggctgagatggatgaattgacagaagtaggcttcagaaggtggataataacaaactttgctgcactaagagacatgagaaaacattacaggagctgttaaccagaataaccagtttagagaggaaccgaaatgacctgatggagctgagaaacacaacataagaacttgacaatacaatcacaaatatcaatagccgaattgaccaagtgggggaaagaatttcagagcttgaagactatctcactgaaataagaccagcagacaagattagagaaaaaagaatgaaaaggaatgaacaaaacctccaagaactatgggattatgtagaaagaccaaacctacaactgattgaagtgcctgaaagaggtggggagaacagaaccaagttggaaaacacacttcacaatatcatccaggagaacttccccaacctagcaagacaggccaacattcaaattcaggaaacccagagaaccccagaaagatactccatgagaagatcaaccccaagacacataatcatcagattctccaaggttgaaatgaagaaaaaaatgtaaagggcaaccagagagataggccagatcacctacagagggaagcccattatactaatggtggacctcttagcagaaaccctacaagccagaagaaactgggggccaatattcaacattcttaaaagaatttccaacacagaatatcatatccagccaaactaaactttataagcgaagaagaaataaaatcttttcagacaagcaaatgctaagggaatttatcaccactaggcctgccttgcaagagctcctgaaggaagcactaaatatggaaaggaaaaacttttgccagccactgcaaaaacacactgaagtacaaagaccaatgacactatgaagcaactatgtcaacaagtctgcaaaataaccaaccagcatcatgatgacaggatcaaatgcacacataacaatattaaccttaaatgtaaaagctctaaatgccccaattaaaagacatagaatggcaggctgataaagagtcaggacccattggtgtgctgtattcaagagacccacttacatgcgaagacacacataagctcaaaataaagggatagaggaaaatttaccaagcaaatggaaagcagaaaaaagcaggggttgcaattctagtttctgacaaaacagactttaagccaacaaagatcaaaaagacaaagggcattacataatgataaaaaggatccattcaacaagaagagctaactatcctaaatatacatgcacccaatacaggagtacccagattcataaaacaagttcttagagacctacaaagagacttagactcccacacaataatagtgggagactttaacaccccattgtcaatattagatcattgagacagaaaattaacaaggatatttaggacttgaactcagctctggattaagtggacctgatacatagctacagaagtctccaccctaaaacaacggaatatgcattcttcttggtgacacatggcacttactctaaaatcgatcacaaaattggaagtaaaacactcctcagcaaatgcaaaagaactgagatcataacattctctcagaccacagtgcaatcaaattagaactcaaaattaagaaactcactcaaaaccacacgaccatatgaaaatggaacaactagctcctgaatgactcctgagtagataatgaaattaagacagaaatcaagaagttatttgaaatcagtgagaacagggacaatgtaccaaaatttctgggacacaactgaagcagtgttaagagggaaaattatagcactaaatgcccacatcaaaaagctagaaagatctcaaattgacaccctagcatcacaactaaaagaactagagaaccaagagaaaacaaactccaaagctagtaaaagaaaagaaatagttaaccaagatcagagtggaactaaaggaaacagagacatgaaaaatccttcaaaaaattaatgaatccaggagctagttttttgaaaaaattaataaaatagttagactgccagctagactaataaagatgaagagaaagaagaatgaaatagaaaataaaaaatgataaaggagatatcactactgaccccacagaaatacaaacaaccatcagagaatactataaactcctctatgcaaataaactaaaaactctataagaaacgaaaaaatttctggatacatataacctcccaagactgaaccaggaagaagttgaatccctgaatagaccagtaataagttttgaaattgaggcagtaataaatagcctaccaaccaacaaaagcctgggaccagatggatttacagctgaattctactagaggtacaaagaggagctgttaccatttcttcttaaactattccaaacaattgaaaaggagggacttctccctaactcattttgtgaggccagcatcatcctgataccaaaatctggcagagatacaaaaaaaaaaaaagaaagaaaactttaagccaatatccctgatgaacatcgatgcaaaaatactcaataaaatactggcacaccaaatctagaggcacatcaaaaagcttattcaccacaatcaagtcagcttcagtcctgggatgcacaaaacataattctaaacagaacgaaagaccaaaaccacatgattatctcaatagacatagaaaaggccttcgataaaattcaacatcccttcatgtcaaaaactctcaattaactaggtattgatggaacatacctcaaaataatgaaagccgtttatgacaaacctacagccaatatctacagaatgggcaaaagctgaaagtgttccccttgaaaaccagcacaggaaaaggatgccctctctcaccactcctattcaccatagtgttggaggttctggccaggacaatcaggcaagagaaagaaataaaggatattcaaataggaagagaggaagttgaactgtttgcagatgacatgatcctatatctagaaaaccccattgtctcagccaaaaagcaacttaagctgataagcaacttcagcactctcaggatacaaaatcattgtgcaaaaatcacgagtattcctgtgatagacaagcaacaatagacaaaaagagagccaaatcacaaatgaactcccattcacaattgtttcaaagggaatcaaatacctaggaatacagctgacaagagaagtgaaggatctcttcaaagagaactacaaatcactgctcaaggaaatcagagaggacacaaacaaatggaaaaacattccatgctcatggataggaagaatcaatgttgtgaaaatggccatactacccaaagcaatttatagattcaatgccattcccattaaactaccattgacatgcttcacagaatcataaaaaaaacttttaaaattcatatggagcccaaaaagagtccatatagccaagacaatcctaagcaaaaagaacaaagctggaggcatcatgctacctgacttcaaactatactacagggctacagtaaccaaacagcatggtacaaaaactgatacaaaaacagccacatagaccaatggaacagaatagagaactcagaaataaataagacgcacatctgcaaccatctgatctttgacaaacctgacaaaaacaagcaatggggaaaggattccctatttaataaatggtgctgggaaaactggctagccatatgcagaaaattgaaactggacctcttccttacaccttatacaataattaactcaagatagattaaagacttaaatgtaagctgggcacggtggcttatgcctgtaatccagcactttgggagaccaaggtgggtggatcacctgaggtcaggagttcaagaccagcccgaccaacatggtgaaaccccatctctactgaaaatacaaaaaattagctgagcgtggtggtggatgcctgtaatcccagctactcagggcgctgaggcaggagaattgcttgaacccgggaggtggaggttgcagtgagctgagatggtgccattgcactccagcctgggcaacaagagcaaaactccatctcaaaaaaaaaaaaaagacttaaatgtaaaacccaaaactataaaaaccccagaagaaaatccaggcaataccatttgggacataggcacaggcaaagatttcatgacgaaagtgtcaaaagcaattgcaacaaaagcaaaaattgacaaatgggatctaattaaactaaagagcttctgtgcagcaaaagaaactatcatcagagtgaacagacaacctatagaatgggagaaaattttgcaatctatccatctgacaaaggtctgatatccagaaactacaaggaacttaaacaaatttacaagaaaaaaacaacctcatgaaagactgggcaaaggacatgaacagacacttctcaaaagaaaacatttatgcagccaacaaacatgtatatatatgtatatatatataaagctcaacatcactgatcattagagaatgcaaatcaaaacctcaatgagataccatctcacgccagtcagaatggtgattattaaaaagtcaagaaacaatagatgctggaaaggctgtggggaaatagaagtgtttttacagtgttggtgggaatataaattagttcaaccattttgggaaacagtgtggtgattcctcaaagacctagaacaagaaatatcatttgacccagcaatcccattactgggtatttacccaaaggaatataaatcattctattataaagatacatgcacacacgtgttcactgcagcactattcacaatagcaaagacatggaatcaacccaaacgcccatcaaccatagactggataaagaaaatgtggtgtgtatacaccatagaatactatgcacccataaaaaggaatgagatcatgtcctttacacggacatggatggagctggaagccattatcctcaggaaactaatgcaagaacagaaaaccaaacaccacatgttattattaataagtagcagctgaacaatgagaacacatgaacacagggagaggaatgacacacactgggacctgtcagtggggaggttaggagggagagcatcaggataaatagctaatgcatatggggcttaatacctaggtgatgagttgataggtgcagcaaaccaccatggcacatgtttacctatgtaacaaacctgcacatcatgcacaagtgtcccaatacttgaaataaaaatttttttaaaaagaaacataaaaataaaaccacaatgagataccatctcatgccagttagaatggcaatcattaaaaagtcaggaaacaacagatgctggagaggatgtggagaaataggaacacttttacactgttggtgggagtgtaaattagctcaaccattgtggaagacaatgtggctattcctcaaggatctagaaccagaaataccatttgacccaacaatctcattactgggtatatacccaaaggattataaatcattctactataaagacacatgcacacatatgtttattgcagcactgttcacaatagcaaagacttggaaccaacccaaatccccatcaatgataggctggataaagaaaatgtggcacatatacaccatggaatactatgcaggcataaaaaagatgagttcatgtcctttgcagggacatgaatgaagctggaaatcaccattctcagcaaactaacacaggaacagaaaaccaaacaccacatgttgtcattcataagtgggagttgaacaatgagaacacatggacacgggaggggaacgtcacacactggggcctattgggggttgaaaggctaggggagggatagcattaggagaaatacctaatgtaggtgactggttgatgggtgtagcaaactaccatggtacgtgtatacctatgtaacaaagctgcatattctgcacatgtatcccagaaccttaagtataataatattttaaataaataagtaggtggttgaagagatagtttgccttgcttgttctagcttggaaaattttcctcttgagagaaggaaatccgcaacctgagaaagattattctccagcccttttaaagaagaagctatgtcacccttttctgtaacatctatttgcatggcacttgactctgtttgaggcgctgttgtttacatgtttgtattgttagcttttgatacataatgaaggaccccaaaactcaatggctttggcagaacaccacagccgtttttagctcaggattctgtggctcagcaatttgggctgggctcagttgggcgattcttctgctggtctgttgggctcattcatgtgtctatgatcggctgctaattcaattgaggccatgttggtctagagggatgtccactaggacatctcatggctcttatcctgcagcaggctggcccaggcttgttcatgtgacagtgggttctaggaggcacaagagagagggcaaacctcaatgcacaaacacttttcaggcctttgctcacttcacacccgataatgttccgccagcaaaagcaagtcatgtgaccaagcccagagtcagtgtgggagggcactatgatagggatgctgggatggggaagggggacttgtagccatttttgcaatcaaccactataatattgcttaatctggacccctgcccagtgagacatgccatgcacatattaattttatggagccatgcacatcccattttatgaggtaaagaatgttgccccgcgtcacatagcaagctggaaacaggactaggcttggaagcccatctctccagtgccagcccactgcaccatcccacttctcttggttccctcccaccccaacatcagtgccaggccagggagagaatgaagtgtcatccaggagccaaaccctggccacctgtacagacatccagcaacagagacatagcagaccctgggtgaaccctccccagacatcagcctccaggagccaatgctgcagccccactgccactgtagcccccaccctggcccagcacagagtggcaggctggttatttcaatcaacggtgttttgaaaatcttgcaatttaaaaccttttaaacatgagtaggtgaggctgtgatagtgccaatgactagttgggagtacttagaggcaattttaaatgtctcctgaaatctccatgccaacggtcccatggggcaccagacaaggttcacgttgccaggctcaccctcctgttagccatttcccctgccgctgcataccctgagggcttggagttccatgcacaagtgcatccacctttaaacacctcatgcagattatttctgtctcacctgcacctgccttcatgtcaggatttgcagaagcctaaagatcagagccaggggccaggcacaatggctcatacctgtaatcccagcactttgggaggtcgaagtgggcagatcacttgaggtcagaagtttgagaccagcctgggcaacatgatgaaattccatctctgctaaaaatacaaaaattagccaagcatggtggcaagcacctgtaatcccagctgcttgagaggctgaggcaggagaatcacttgaacctgggaggcagaggttgcagtgagctgaggtcacaccactgcgctccaacctgggtgacagagtgagactccatctcaaaaaaataaaaataaaaaaaatttaaaaaggccaggcgtggtgactcacacctgtaatcccagcactttgggaggccgaggcaggtggatcacctgaggtcaggagttcgagacaagcctggccaacatggtgaaaccccgtgtctactaaaaacacaaaaaattagctgggcttggtgtggggtgcctgtaatcccagctacttgggaggctgaggcaggagaattgcttgaacccaggagatggagtttgcagtgagctgagattgcaccattgcactccagcccgggcaacaagagcgcaactccatctcgattaattaattaaattaatcagagccaggagatctgtgaggcccatgggaccagtctggctgtgggtgaagtacccaggaggcagtaccctgctctcctggctggatccccactttccacacacccgagcctcagggaactccacccaggcacgtgggcatccatcagctcgtccatcacatccgcctgtcgtccttcccagtaatgcctgacagcaaagaatgagagcagattggagtctttgcagtgacaaacgcaggacgattcttcccacaaaaggggcccagaggcagagcaccagcctgagctgtgctgcaggagggccaggagggatgactgcctgaagcataaagatctggagaggaaggtctgcacacctggagttttgctgtcctaacgcttctcagccggggcccagaactgtgtgcagaagcgatggtctatggacaattcacctgcccctcggatagcaccacccactttgcattcggatgtttgaacacagcctgtgtttcccacagtggtcaggtggaatcctggactttcaggccagatgatttgtacaacctcctccttctacaaaaagaggatgatgggggccaggacatgaactccatgacacagacagctatggccagagcagggagaattaaggagcaggagacgccttggataggaaggactaagtgtgctgctacctggagagaggagagctgtgcattcaggcccagccttgtcagggaagcctcaagtctctgtttattaaggctggagggaaccagccatcctggctgcagtggtggagtgaaagcagccgagccctctgcactactgaaaattgacacagggtagggtctcccacacccctcctcacaggcacggggctgcagcccagctggtggggtcaagagaagggaggagagaggcctccggatggtgcagatgagcagggcggggctgaaaactgcatccattcatgccgctgactctaagcaagtagtgacgtcccccgggggttttggcagcaccaaggatcgtgcagggtgcttccacacttgctcctctcataaccctggagggagcatcccactttccaggtgagaagcccagggtttatgggtgggctttccccagttgcacgggaggccttaaaacaggtgaagaccctaaggaccgacggggagccaggcgggggaccaaggcgaagcagggtgaggcagaggtgttacagcatccatggcaggccaggggccaggttatgatcacactggagagacaggtgggagtgacccagaagttgctggggtcatttctcaaagaccccagcccactcatctccaccaacctgcaatttctcagctccacactgcaacccaaagagtggacagacaaggttgctgtggaaaaaagacttacacacagcaacatcaggatgccccagacagggtgcgtgggagtgtgaagctgtgcagtttaggcaggggcatggaggggatgccgggatgcacaagggacagaattgtgtgggatcgtgtagccttcatggaggaagaggacaagcagggccagaaatgatgaggacatttctgtcctcatgtatctggggagaaggaagcatattgtcttttttttttttctttttttgagacagagtctcactctgtctcccaggctggagtgcagtggtgcaatcacagctctctgcagcctccaactcttggtctcaagcgatccagccttctgagcagctgggaatacaggtgcatgccaccacacacagctaattttttattttttgttgtgatggggtctcactatgttgcccaggctggtctcaagctcctgggctcaagtgatcctccagcctcagcctcccaaagtgttgggattacaggcataatcaaccacacccagctcatatcatctttttattaaaataaggtaatgacttggacattagagctgtcactccccacttcaggccaggcgcttgtgtctgatctcactaggatcctaaagtgtatggtctgtaaattacaaactgcagcaacaaaatgcttaatcattaaaccaaggcagccactatgcaccagcctccagctgggtgctaagcgtgagtggccccagcctggggaagcctcactgttcctggtctgctgtgagctcctaggttcttgagactcaggtgttaaccttgcctgttttctcatcccctgcaggcaccggccgtagctacaccacagacccactcttgtccctgctcctgttagctctgcataagttcctgcgcctgctcttgggacattgacagacaagaccaacccgagcatctcagaggccgcacatgacctgcccggggccctcggtgaggaccatgtcgctggatggacacagagagactgagagacgcatgaaaaagtccacatggaaaataaataaatcatatttttgggaaagttacacaaatgtagaacacctaaaataatgcatctagtttccaaataatttggagtttggcccatgcagtctgcatgggaatcaatgatttctctacttcaatgtagttttcttttctacactttccctccaagtcttcattttgcacgaactgttgagcagttatctttaggataatatgtacaaatgttggggtcaaagccttttgacaaagcaaaatatttttagtagattattgtgtttaggatttttttttaatttactttttttctttgggggcttttcttttttattaaattatttcttttgaggcattttgattaaaaaagacacatcttatcataattaaaattcactgtcaataatatttatttttaaataaagattggaaacaaggtcagacacttgtttataaactgtattgtatattgctgaagaacagttgaataaaaaacaactttgaaataacctttctacagccatggatgaatgtcaagcgttggtgcccactgcagcctggctgcctgccgttccctcctgtgctctgacaccagctgcacttttggctgggtgtcacccggcgtggaggacagcccagggcacctggctaagaccacgctgagcagatgggagcacctgacaagcctcccctagggacagggcacttcatggaggcggcagtgagacgatcccccagcctgggtcctgaaggaaaggagatcgctaggaggaggtgtgaaataagtcaagaaccactcctcccccacttcgtttcaatgaatcatgcaattcattcgcccacttggagattgtaagtcaaggtgtatttactgtggttagctttgctgctagtttgaagggggaatttggagagaaagtagggcttgccacactccttcccgtgcatctgaagattgctttgagcctctgaaactcatagatttggggcaggttacacatgccctaaggaaacgggcatgccctgggtgggggctactatttatacttcattctaagacagcatctcattagatagctggagcccatggatttgtttaaaacccagccagattttaacacctgcagtttcaataagtgtggttgtcattgatgttgttcaccaaatacttccgttctccgctggccaggcccagggcaggataacgcttcctggcctcctgtggcgggtggggccacagctctggcgcatgagctgggaatagaagggatccgcattgcttctagtccaagacacaggattgctagtgcgacgccctccaaagcacttgtcctctaacgtgacgactcgcagcgttcacatcagcaagtgttcttccagcctaggtcgctgagtgactgcgatgaacacagcctttcctgtggccagcgctggatcctgcggccccatgagaagtctgccattgccgcttcacccactcatcttcgggcattatcgcagcataagccagcctgtcctgattggctcagtgtgtagttgattgactgtatttagctcaggggaggagtaattgtgcatttggacagtcccacgtgtacagagacccccaggatggagctgatgtcaggggaggcctgtgtggagagaacgtcgggacggctgtttctgatgggtacattaacttgtttcacatttcctttatattgatcagcaccaattgagctgtaagtttaatcactctgtctggtggatagtgattctgtccagaaggatcatctctttttatagttaactcaatactgcagcagctaatgtcatgtgaaatactggcccagtgtgctggagagcaaaccgtacttcccagataccagtggaacggggacaatgtgtcagtaagggtgacgttgtaccagatcgttccaggggatggagggctggggagtcattccccatcaccaaaaccagatgcctctgtacaaacacaggtagtcaggtcccagcctggaagctcccaacctttagcgtgatatgcacaggggaggggcaagtgtgatgggcacagtggagggggcaggtgtgatgggcacaggggagggggcaggtgtgatgggcacaggggaggggcaggtgtgatgggtacaggggaggggcaggtttgatgggcacaggggagggggcaggtgtgatgggcacaggggagggggcaggtgtgatgggcacaggggagggggcaggtgtgatgggtacaggggaggggacaggtgtgatgggtacaggggaggggcaggtttgataggcacagtggagggggcaagtgtgatgggcacaggggagggggcaggtgtgatgggcacaggggaggggctgatgtgataggcacagtggagaagctggtgtgatgggcacgggaggggctggtgtgatgggcacaggggagtgggcaagtgtgatgggcacaggggaggggctggtgtgaggagcataaaggaggggcaggtgtgataggcataggggaggggctggtgtaatgggcacaggggaggaactgctgtgataggcacaggggaatgggcaggtgagataggtagaggggaggggcaggtgtgatgcctacagcagaggggacaggtgtgatgggcactgaggaggggctggtgtaatgggcacagggaagggactgctatgatgggcacaggagaggggcaggtgtgataggcacggggaggagccggtgtgatgggcacaggggagggaaggggctggtgtgataggcacaggggagaagctggtgtgatgggcacaggggaggggctggtgtgatgagcacagaggagaagtggtgtgatgggcacaagggaggggctggtgtgatgggcacaggggaggtgctggtgtgatggacacagagaggggctggtgtgatgggtacaggggagggggcaggtgtaatggctacaggggaagggcaggtgtaatcggcacagaagagaagctggtgtgatgggcacagaggaggggctggtgtgatgggcacaggggagggactgctgtgatgggcacaggggagggtcaggtgtgatgggcataggggaggggctggtgtgacaggcacagggaagggggtcatgtgtgatggcatggggaaggggacaggtgtgataggtacaggggaggggctggtgtaatgggcacaggggaggaactgctgtgataggcacaggggagtgggcaggtgagatgggtacaggggaggggcaggtgtgatggctacagtggaggggacaggtgtgatgggcacaggggaggggctggtgtgatggacacagggtaggggctggtgtgatgggtacaggggagggggcaggtgtaatggctacaggggaggggcaggtgtaatgggcacagaggagaagctggtgtgatgggcacaggggaggtgctggtgtgatgggcacaggggaggggcagatgtgatgggcacaggagaggggcaggtgtgatgggcataggggaagggctggtgtgatgggcacaggggagggacttctgtgataggcacaggggagaagctggtgtgatgggcacaggggaggggctggtgtgatgggcacaggggaggggctgatgtcatggtcacagaggaaggagcagttgtgatgggcacaggggcgtggccttgtgtgatgggcacaggggaggggctggtgtgatgggccctggtgagaggaacaggtgtgctttggagaaaccagctttttctgcacaaagaggattcccctcaaacacagaaaattattcctaatatctgcctcctggggacagagaacttccaggtgggaagccgagcatgaggctaagcatgttccctgaaggggaggctgaacccggcctccagcagaagttaatggaactgagactggggctgtcgtggggctggaagccaaggcaaatctctggacccaggcttccatggagtggctaccagcattcccactggtccagggccccggacacaaagaaaggagaagttaagtgcacccctaagtatccgcagtgccgatccatggggtctgggctcctgttttctggggtctcacgcactccgagaatgaggacaaagaacacttagcctgcactgtgttttatggaatgcatacaaaccagaagagagaagcgccctccagaaacaaaaaccgtggcgtggtgctcactcccaaaactgcctttccctttggagtttgctttcagcctcggcagacatgggctggggttggagagcaagacaatttatttcagtttgggaagaatgcactgtgggcggcctcgggagctcgggtgcaggctgacaggacccccgcctgcttgaagggactgtggagctgtgggtctgtgtagcaactaaatccaaagtgagggacaggagtccagagggagtgcaaactccaccccagcccagagctgagtgacagcagggaagagaaggagggcagccagggtaggggcacgtggagaccgagccaagcccagacccctgtggaggagccctgctctgcctggtgatgaggattgtccctgattctagcccctcatgtggtgctgacccacctgcgccctccaggcagcggccaacatttaggggcatagcctggaaggaaggacaggaattcccagaatttgacaggaggtggtatgagcagagctgcagcattctgagtttcagttctgtttcaaccccacactcctggttacagctctggctcagaaaacaacagctctgtcggatccaagcctgccgttggttggaatacagcaaacagccatttgtgagctgctgagctcctggctaaagggacttctgcccctgccagccaggggaacagtttttttgttttgtttttttttttttttgagatggagtctcactctgtcgcccaggttggagtacagtggcgtgatctcggctcactgcaacctctgcctctgggttcaagcaattctcttgccttggcctcccaaataactgggactacaggcacccgccaacacacccggctaaatttttttgtatttttagtagagacagtgtttcaccatgttggccaggctggtctcaaactcctgacctcacgtaatctacccacctcggcctcccagagttgggattacaggtgtgaggcactgcacccggcgagttcttgcctatttttgcactgcttcttccagtgggcccatccccactttgggtgacactgggcattcattttgcctgcatttcagaggatgcaactcctgcttttcctgggggacaggtggccagaggctttgatgcatttgcccctatatgcatgcacacacctgtatgtagcagcctgctgctttagaacaccatttctttccttctcactaaggctgcagcagcaggagtggtgcagcactggtgaaacctcagccaactgggcgcccggtctccccagaatggagctgctgcccctcagggctccctgccttcatcagccaagaagagcctgcacaccctaccacagcataaatacaccttttacctcatgccaggggccctagaaacacatggaaaacccacgacctttatgagggacctgccccactttgtggctgcagacacaacatgaggtagagtctggaaacaccaccaggggtgaccccttttaaatgacaaagacccaaggagcaccaaaaatatatttcaagtcacagaaaacatgacttcacaccaagcctaacttgccaccaactagcaaagacccaacaaagatcacatgtgttccctgtacctgattgtttaaaagggagaaatggtaagtggactcttagtagaaagcatatatggtctcgtttagattttgaagttagaaaagattttttaaatgagactgaaaaagcggtaattataaaagaaaatatggaccgggcatggtgactcatgcctgtaatcctagcactttgggaggccgaggtgggtggatcatgaggtcaggagttcaagaccagcctggccaacatggtaaaatcccatctctactgaaaatacaaaaattagcccagtgtggtggtgcgcacctgtagtcccagctactccagaggctgaggcaggagaattgcttgaacctgggagccagaggttgcagtgagctgatactgtgccactgcactccagcctgggtgacagagcaagactctgtctcaaaaaaaaaaaagaaagaaagaaagaaagaaaatatagacaattttgactacattataacaaagagcactcgtttaccaaaaaccatcacaaagaaagtgaaaagagacttacaaaatacacccaagaaaggattactatcaaacatgtacaaagaattcctagaaatcaataagaaaagcaaaaacaggctgggcatggtggctcacacaggcgaggcaggtggatcacctgaggtcaggagttcgagaccatcctggcaaagatggtgaaaccccgtctctactaaaaatacgaaaattagccaggtctggtggcacatgcctgtaatcccagctactcgggaggcggaggcaggagaatcgcttgaacccaggagacggaggttgcagtgagccgagatcgagccactgcactccagcctgggcgacagagcaagttgactccatctcaaaaaaaaaaaaaaaaaaaaaaagaaatgcacaaaaagtacaatgggaagatggaccaaggatgtgaaccaccatatcatgggagagaaaatatggccagaaaaaaatataaaaggttttcagcctcaatagttacaagagaaatgcaaatcaaggccacagtgattatgcccacttaattatcaaaaatttaagtctgacaaaggccgggtgccgtggttcatgcctgtaatctcagcactgtgggagaccaaggcaggagggtcacgtgaagccaggagttccagaccctgtattagcatgacagcaagacctcatctgtgttagtccattgttactgcattgctgtaaagaaatacctgagtctgggtaaattataaagcaaagaggtttatttggctcatggttctgcaagctttacaggaagcatgattctggcatctgcttggcttctggtgaggtctcagaaagatttcacttgtggtggaaggtgaagtgagagccagggaggggagagccgtgaggagagagacgaggaggggatgggtgccacactcttaaaacaaccagatctcaagtgaactaactgaaggagagctcactcaacaccaaagggatggcatgaaatcattcatgagggatccgccccatgacccaaacacctcccaccgggccccaactccaacactggggatcacatttcaacatgagatttggaggggaccaacatccaaaccatattaccgtctttgcaaaaaaaaattaaagatagccatgcatgatggcaagcctgtagtaccagctactcaggaaggtgagacaggaggatcgcttgagcccaggagttcaaggtagcagtgagctgtagtcacgccactgcactccagcctgagttacagagttggaccgtatctctaaaaaactaaaaataaataagattctgacataccaagtgttagagaagttgtccatctccaagatcacctaagcattgactgtgggtgactgtgggagtgtaaatcgatacaacctcactggaaaacactttggcactaactgttaaaagtgaacattcacatactgcgacccagagattccaatccttagtagcaaaatctctttctcttgtgctctggggaacattaaaaaaaaaaaaaccttcaaggcagccccattcaataccctggaaacagatgagttcccatctataggagagatgatgcagatgctgtagacagttctcacaatgatatgaacacgacaccagctactccatcaagggtcaacgtgaatgaactgcaaggaacatgcaacaaaacactgagtcttagcatctattagtggggaaaacccccaaaaagggcagagtgctcacgtctgtaatcccagcagtttgggaggctgaggtaggaggatcgtttgagcccaggagttcaagaccagcctgggaaacatagagagactctgtctctattaaaaattttaaaaatgtagccaggtgtggtagcatgtgggaggctgacgtgggaggattacttaagccagggaagtcaaggctgccgtgagctttgacttgatagcaccactgcactccagcctgagcaacctagtgagaccatgtctcaaaaaaaaaaaaagaaaagaaaaaagaaaaaagccctgaagatgacatacagtataatacctttgtcataaagttaaatccaaactaaaaccaacagatagagggaggatggatggatggatggacagatagacttcttaagaaaacacgtagctaagataaaactgtcttcaaaggaaagcaatggaaaggtgaagatggatacaggatcgtggttaccttggtatggggaagcagaggtataaggagcccacaagtggatgaaggtcgtcatcaaactcttagttttcaaactgagtgatgggttagggtacatctcgtgttatcaaaaatgaatgaatggccaggtgcggtggctcattcctgtaatcccagcactttgagaggccaaggtaggtggattagttgaggccaggagttcgagaccagcttagccaatatgttgaaaccctatctctactaaaaatacaaaaattagctggacgtggtggcgggtgcctgtaatcccagctactcggaaggctgaggcagcagaatcacttgaacccaggaggcggaggttacagtgagccaagatcacatcattgcactccagccagggggccaagagcgaaactctgtctcaaaaaaaaaggggagaggggagaggaaaaaatgatacagtcctatccaggacttatattaaaacaaaaacaaagtaccaacttttcttttccacagtccccaagacaaattcacatctaactccatctcccacccagaggttgcaaactagcacttctcaagctgcatctggctgcagacatgctatgtttgacgttcacagggatgtttcttgttattttacaatatcggaaagtctcatgtaaacatccaaatttctcctgtcctctgcagcaacatggatggagctagggaccattattctaagtgaactaattcagaaacagaaaatcaaataccacatgttctcactgattagagagctaaacagtgggtacatacataacgacatgatgagaatgacagacactagggactccaaaagccaggagaatgggagggaagtgagggttgaaaaattacctatcaggtagagtgttcactgttcgggaggtgggtttgctagaagctcaatcccaaccattacactatatgcctatgtaacaaacacacacatatacttaaaatttgttttaaaaacccaaatttctggcttctcctgaaaaaaatataatatgcagccacacggggcccatattcctatgtggtgacaactggtgggtgccaagtaacagctgcccccatgatactccaggaggtccttccctggctctactctgccttcaccctctgcagcctcggccagctgtggtcactgtaccggcctcacggggccagaaaacattgccgccattcagagtgtttctcaaagagagctgaagcaaaagaagttttagggttaaccagaatcccattcctgaagcggtaattgatgttttcgaataacatgtatccagttttttatttaagaacaccacaaagaagttaaattagattgcagataacctgcgctttctttttctgtgcaagatttttctgtgcttttttattttggtaaattatagtatacaaaatgttctggttttgctttgaaagaaggtctgctgtgtgtctaaaacacaatctactaacatactcttatctgcataaccgattaactccctgtttgtgaccagacatctttctactccctaaataccaaaagacgtggccattattgtttaagcctccttcacggactcatttctaagccctttgatggtaaaattttgctccccgcccctgcacctccacctgccatggtttctccaaactgtgccctaatgaattggtgcttttaactaagacagaccacggtcacttttcaaaacgttaattcccataaaatgggatgtcagttttacaaggaaggctctcctttatcagcaaaaactgattccatttgactgattaattgtccttagaactgtcaaaggcttccagactagggaagacggcttgggaggaggcagacatgcagccttgcgatgtggggcactcctgggctggggaaaacaggagattacaaatgcacaaataattaattcaaatcaatacagcgaggggttcaggctgagagacattcaattaagttgctcaaagagaagatgctgatcttcagctagtcctctccatgctgcaaataatagagcatttttaatttgtgcagcagggatgttaatcttttgccatgtaatccagtccttggggaatgccataaatatgtggcactgcgcatgtgaggctccctgaggagggcactcaatcaacccagccctggctttcctgcctgtctgtatgtcaatctctcaacactcaattaggaaatatatgataggctaatagaggatggatggatggatggatggatagatggacggatggatggataaatggatatagaggcagagacagacaaatgttcaaagattatcagacatcccttacccgcctcccccacccataaacactttatgacttctggattttgcctgaaccaacagcacaaataaatcccaaggaattattcacatttcaaaaggattcacttcagaatgcctttaaatagcaagctcctatagcatgtttaaaataggatctgaatcccaattttattatacagagaaagagaagcacacacatacatatgaataatgatttagaaggttagacaccaaggtgttaaaagtttatgtttctatgtaagtagtattgtagatactttaatgtctgactgcggtctggcttctctgtgattattacttctgtaataagataaaagcagtaaagtatttttaatttaacaaaagacaattccaccccccaaaaaatgtaagcttcaatttataaagatgtaactctccacctgttttcagaagaacatttgctgtgtaaaaagaggctctccaggaacatgctatttagtcctcattcttcgataactgagcatgggggctctgagtacatcacttgggtggggagcttgaggcacctctgtggtcccctaccacacccactacaccaagagatggcccaccaagagttgtcctggtggcaaccaggactcaggggaaggagaggctggaaatgtggggtgcctctgggaccatggacctccaaagctctgcagcacctggacattaactacgtttattcattcagcaaacacacattgatcactactccataaacagccctgtatgggagaaacagataaagtatgcaaggatcaccccctaacccccggtaagggagctggtggtctggtaagaagaatcaacacctccacagctaagtggaatacaagctggactgtgagacccacagtagggatcttagcaagggactcaggaagggaaacaattcattgtaatgggtgggggtgggggagatagcagggacttatcaaatgtttgtggaaatgagctcaagtagcatttgagctgggtcttaagaggcctcctcgtctctccctgatgctcggagagtcttattagacacagacagctggatctcccctacaaccagagccactgtcgtttgggcaaaagtcaatccttcctcgccagcggctgtcaccagaagtggcagcctcattgcatctcattctgaggcgtgagagcctcagaaacaagagccagtgagtcttggggtatctgagccacaggcagcccgtgtgggagtctcggagcccactcaagagcgtggataaacctcgggacaggattgtgacaggcagcatatgcagaaagttgagtcagccctggagagtggtgcatcctgagcagctccagcaggcggtgcctgggagagatgggctgcaccgcgtgaatcagagggcacctgtcatgatggagacagatgtgtggggtaagccagccacaccacaaatcaaaaataacaaggaaaactctgggcaaatgaaactagagaaacgtcagctcttagccttgccaaagccgggctgctctgtgcacagagactcacccgagacaacagaaacagggctgggtggacgttttgcaaatgaatagtcagagagagccatgggttgcatttgttgacggtgtcagaaaactaaaatcagtcaaataaatgagaaatttgccatttcccccccaaattttatgaggcggggactaagaaaatgatccatcaagcaggaaatattttagctgttggtttttatttattagagaggtgtacagagtttggcatgctacagtgtacattttctacaaaatagaaatccataaaagccagagagaaagttgagattttgtccctgcttgttgctgtgaagttctccgtttcccaatgtatgtcactggtaaagatgaaaaggggaattttcactgtaagatcatatgcaaatgaccctcgagatgattcagccactccaatgtggaggcgtctactatcttcccacaacctggcttactcaggctttcagggctagagatgtgaactttagctgtatcctgactatagcagaatctttttgcaccatgcatgacattcccgcagccctccccgacttcaacccctgctggggtggaagcttctaggattgacccaggctcctgtacaggagaaagagatactcaagggggaaacccgcgcctctctgattttccctccagggcttcctctaagccatgttgcctgtttggctcaagatcaggctctgcggaagcacactgcagttggatggctcctggagggtcccacaggtgaatgtctgcatctccctgtccgcaggcaggtccttccggaaggcgttgtgcctgctcctcagtgtacagccacacccctgttgcccaagcagcaagctccatagcacatcctttcttggctttttcttcttccagactcacactctctgctccttctctcccactttctagactgacccccaaataaatgacttccccctctgtccttgccccaggctctgatgagaacacagactgtgcagatgtgtgataccagcatccatttccctcactggggcatagactcggtgtttccttggggaattaccatgctcttgttgtgcacagatttgagggaggcagatccaggagggaaccaaagtggccagatgctcacttccccatccccgaggccacctctgcgacaagaactgactcatgcccgagccaccagtttcccctggaggggagcaaggatgaggggagcagctcgctgccggtccccagggacaggggcttggtttgctgaactgtctctgctgtatggccctggctgtggcttctcctgcctggcccacccagctcccttggtgccacccagctcccttggtgccgcctacctcccctgagctcctgacacccctttccactaccaccaccaagagattctccccagtggaagggaacggggcaggttctgtgggtgccacccagatccccagctgacatggttagctgcagtgacagagccagctcaagccagcctaggctagccagggtagtatatcagtatatgggggagcttcatggaacccaagtgtggaatttcacctgcgcgtcagggtggggttatgatctgaatgtttatgtcctcccaatattcatatgttgaaatcctaaccctcaaaatgatggtacaagaaggtgagggcctttgggaggtcattatgtcatgaaggctctatggaattagtgtccttataaaagagaccccagagggaccctcactctttccatcaaggacacaaatagaaagcactgtccatgaaccaggaagccctcaccagacaccaaatctgctggtgcctccatcttggacttcccagcctctagaatggtgagaaataaatttctgttgtttataagccatgcagcctatgggattttgttatagcagcctggatggactaagacaccatcactacccagtgtctaacacatctgcttcatgcccctctctctacctaccggcttccttcacttagggccgcgcagctggtgaaaaatgacccactcccaaatattcgtgatacttgcagctacccaaagaaagggcgttcacctctttctcccactttctctctctttctctctctctcttcctccctccctccctctctccctcccttcctttcctccatttctctctctttctctctctctctctgtctctctcatgcatacagagagagagagagagagagagtcctaattcaaattcccagagaagcactcagattggcacagctcgggtcagacaaccacccttaattcattcagccaacgatgacaaggcacgaggagttatccagtgagactgccagccccaacccctaggactgccagccccaacccctaggactaccagcctcacccccactgttggagggaacagagagccaccgggatctgggaagatgctctaaaggatgttcaccacagcagcacttttcaacagtctccatgcatacgaatcacaggaagaccttattaaaaagcaggtcttgcttcactgggcctagggtaaggcctgagggtctgcatttctagcaaactctcggaggctgctgatgtggctgtacaggacccatacgttgagtagcagagcattccagattgggcaaggaggacatactcacccctcttcatctcaccaaggaagccacccacccctccttccttccaatgagagaaatctgtttgcttaactgcaaagattaaaaggaagccttcttgcttgttgagatatgataaggggtgagttgtcactgacattttgatgaggctttttttacaccgggacatttaacaaagcctacaaaccaaaccattaaatgttcagccaagcaattactttcaccaagtagtgagcaaatcagatcaaatcagaccccagccctaagcctcaccccatcatctgccagggatggtgatgggaacatcactgataaattataaatggtaattctacatctggacacagtacttttgccttgaccacatcaactggccacgtcaaagtggtctgtcatctgtcccacttgcccagtccccagagtcctcagctatttaccctgcgcccccagcctcccgtaaatctcaccccctgcagtcgtggtgtcttctgccttctttcaagatggatcctgatctgcagagaccctgatctgcactcatcataatgtgctttcccctccctggtctccatctgctcttgtcctgtcctgtttgtgatctcgattgccacaggtaccagccttccctattccaactgctctttgtggctgcagccagtgtggcccttcagagaccttcccttcttgctatcagtctgcaagtggccaaggtctctgcacaaggcaccccaggcctgggtcagggaccatttagggcagcagcaccatcttaccggtgaccctacaaactgaatgctacagtgcctgctgtgaggctgccaggtggtggaggtccatatgtccctttactcagagcctcagaaacaggcatatgggggccctggggggccacatggcactgtgttccggggaccaccttctaaggggaatcctgccaatgcagaagcaacacagccatgcatcaggtactcagcacttcacacggccactgtaccctatgttttggcccaccctctgcacagctgccttctggaaaagcaagtttcccaacactatccagagccagaattgggacccagaatgtgcctgtggtcttcacggaggttaatcttggatgtaggcctggctccggagccaagagtcttcttctgggcatccacgctcgcaaagtagcttgcaaccctcattagggaagcaacttctgagaagagaattctgcatccctgacctccacccagagaacccccctcctcaattcagcagcatggtcaggactggttcaatcgcgagtaatagaaaaacaactcatgtgactacaaagtgcaggcatggctggacccagggtgcaagcattatcaggcccaattcttctcctgtctcttggttctgccttccttggactgacctggctgcaaggcaggctcctctccatgtcttgactccaagggctcctgcctcacatattcctaatttagcagctagtggaatgggtccattggtctggcttgggttgtgtgccacacggagccattcacggtggtcagggagacatggtgctcttcttggccaggcatgagtcataagcctaacactagagctaaggactgagggtgggaggtggggctccccagagagaagttgaggagctgctagcaaaagaaggcaagcaaatcacaatttggctaaaataactaaacttttgggaataacacatagcattttgacttgcaattactacaaataatattacattaagcagttaaccaacagactcaagaaatagcatgtcctggataattccatatttctagttaatgtagttaagccccacacaccatactctcagattgctgaaattcttaatttgggttgacccagatgcagatcctgagattaggatttgagcaaaagtagtctctttgggaagtcatgaaatatctgcagggtagagggaaagtgagacagggaagggaagacaccctaaaaagggtgtgctatcaggccagttaccactacgggagattagaactaatccaacaggggaactgtattcacctgttcctacgctgctaataaagacataccagagactgggtaatttataaaggaaagaggtttaatggactcacggttccacatggctcaggaggcctcacaatcatgggggaagacaaggagaaggaaagttatctcttacatggtggcaagcaagagagtgtgtgcagtggaactcctatttatataatcatcagatattgtgagacttattcactaccataagaacagtatgggggatcgcccccatgattcaattatctccacctggcctgcccttgacatgtggggattattacaattcaaggggagatttgagtggggacacagccaaaccatatcaggaacactggggagactggaactaatcctactggggaatccaactggggaactccaatcctgggggagattgcaaaacacacctcagagctgtcctacccaagggatgagggaggtggggtattgatactcccactgctgtctgtcattattgaaagctgttcttggggctgctgacttcctggcacttctggcttgctgctcccattgacgaaggagccccaggcaaagagatgcaggttctggccattggaagtgggagtgacatgcacaaaagtgggaagggtgagaggatacagacagggagccaaccacatccactacaccaatttccaaagaataactatgctgaattaccttgccatggaggcccaacagtcactggagaatcatgtaactcctctagggctatcacaggaatatcattgtctgctgtgtcaagccctttacaaaaatatagttaataaagatttttgatagaccattgagtgaagtctctttatggtgtttaaatgttagaaatgtctgcttggagactgatactttatttcactttggtattattctcactaagaattttaaaacattttataaataacatggtctctaagtcatcctgagaaaagaaaactgaatttcaagtgggtttttttttttttagtcaatttcttttttaaaaagatccaaaccagttgcataaccttctggaaacaaagtcactgacagattgatttttgcacatttcactcaattgttctgacttttgactagaaaccgccacagcaaatgtaaacaccagcctctggtgggttactgtggccagtccacagagcttgtccccacttgttttcatcccaaagaaataaaaacagaggttaaagaaggaacactttgttctgggagagcccaagctgaggatctgatcattacacataagagtcatcccaaatgcaggccattaacctgacgttcacagggcactttaccgtttaagaggcaatttaatgtccatcatttcatgtgaccctgtgagatgggaaggacatgggttatgagttccactccacagacgagggaaccaggcctcaccaggcggggagttcatgaggttgttggaagaggtagaagccaaacgaatctctaaactcaccacgttctatggtgaaggtctttctgctaccctgttggtcccagatgttaggtttctcatgaattagtaaaagtatttgattgaaccatctggcattgccatttttatgggtcacaatgatcaaatacagcaaatttgccattttatgggtcaaaaacagtcaaacgttagcaatttcacatggtctgacctaatatgaaacaattggaaagctggttttggtgagcaagaacactgagaaaaacttcactattaatgccatttcagacgggaaggacattttaaccaaaaagataggaaggttgcatcttggcacacaggaccttgtgcttttgtgcttgctgtgctgtccacgttgtgctcattggaccaggtttgggagccagggagccatgtcactctggagtcttccgggctgactttctccctcatgaaaagaaaatgctaggggagcccctcttggggccaccgtcatggaaactctgtgctccagggatagggctctgattccggccccctccttcatcccattgacctgcctgccagccccactggccccaagaaaggaaagagggtggcaggtaggaggcagctgtcatctgatcctcaggtaaggcatggcaaagcataggagggctgcaaaagtggcaagcaatgtcatctgcctgtggaaccacccccaccaaatagtgaagattagatacacaagggagcaactcctccaatgcatctcacagcagaaagctgcaggctgagtaagagtgatgactcataatgcacaactgttttaagacaatacatttttatgtttttaaaaaaaaaaaatttgtgtgtttagtcttcccctgcaccaagctcaatattcaagtcaagcattttcaagaatgggccccacagatcatcatcttcactgcattatttctaattgcattattgcttaattgcagagcaatagagtgtgtaatttgagagctgtgatgcctggggggccagggatgatttaactttccatgcaaagcccagagctggggaaaactggcctgaagacagcagcaggggtacagcttccttttccagctgacttattgaatatctcacctctgccacatcagagaggcagctgagagcaaagaccccttgcttggatcacacctcatgctacccttgcagcagaacagcctcatgaagagacctgaagttcagaaatgatgcatccaacagtcattctatgcctgccactgggctgcatgagcaccaggaatgcaaagaaaaacagagcttggttcctggcaactggagagccagagtctagcaaaggggaaacagagctgtcaacagagccactcgatgatggagacaagctgaggaggcttccttgagaaggggagcctagacctagtctctattaaaaaaaaaaaagaaagaaagaaagaaagagaaagaaagaaagaaagaaagaaagaaagaaagaaagaaagaaagaaagaaagaaagaaagagaaagaaagaaaaacagaagaagaagaaagaaagaaagttaggtaaataagggactgtgagactaggtgctgaccagacctgcttcttttggatcccatcgattggttgagtgctgccagaaggagccagtaagtggggcggggtcggtggggggtgcagatatagagaaggggagaaggaaaacaaaggtgtgaatttggatgaagtcccagactcagcctaaccccgtgggaatctctggagtataattgcacctcagagtttgacctgcatgaaggcaatgatgctgggcttttttttttttggagacggagtttcactcttgtcacccagtctggagtgcaatggcgctatcttggctcattgcaacctccacctcccaggttcaagcgattctcctgcctcagcctcccgagtagctgggattacaggcgcccaccaccactcttggctaatttttgtatcattagtagagacagggtttcaccatgttggccaggctggtctcaaacgatgctgggcttttcttctcccaaccagtcgttgactatgggctgctctgagatacacaggtacttctctgcatgcgtgggaggaggctctagtgcccaagagcagcgtacaggaggttgcaggttgcaggtgcagtctattagcagaaagcacacagatgcttggggatagctgcaaggagttgataaaagtgatccaagaggatcaaggtggatacggcctccaatctgtaaatgccatgtgacttgaccctgaccataagatgtggatggaacaagatttgccaaattcagatctgcacttataaaccccagcacaattagccacttgacctgctctctttccagttagtgtaagtcctcttagttcttccttttcaaaatcattttagctattctagattattttacttgcacataaaatctttaattagctattttcgattcttttagttccacataaatttttaaactagcagatcagtttctgaaaaaaaaaattttttgaattttgattgggatcatgttgaatctgtagatcaagttggagacaattaacatcttaataaaactgagtcttctgatccatgaacatggtatatttctccccatttttttagatctctttaatttctctcaacaatgttttgtaggtttcagtccacaagtcaggtacatcttttaccaaatttatctctaggtatttcaaatatctgatgctatttcattattctaaatttaaatttcttattgttgatcatatatagaaagacaatgtacttgtgcatactgatctttttcttgcaacattactgaacttatttataagttccataggtttttttagattaattccttaggattttttccataggtgaagatgctatcagcactatcagcaaacaaagatggttttgcttcttccttttttaactgtatgcttgtttttttttttttcttttcatgccttattccactaactagagactctggaataatgttgaacagatgtgctaagagtgaacatcttgtcttgttactggtcttatgggaaaagcattttgctttttactgttaagtatgatgttagacttttcacagaaacgttttatcagcctaagaaaatttctctctattgctagtttacttaggatttttatcatgattggatattggattttgtcaagtgatttttctgtatctgttgagataagcatatgattttcctttttagcctggtaaaagtgaatcacactgatttatcatcaagtctctccttggtcatgattttttaagttctgttggaaccaacttgctaaaattttgctaagaatttttgcatctgtgtttatgaggaatctctgtagttttcttttcttatagtgcctttttctggttttgagattagtggtaatgctgacctcatagaatgaattaggaagtattgcctcatctttaatattctggaagagtttgggtagaattgacattatttctttctcaaatgactcaagccacctgggcttggaattttctttgaaggaagatttctaactctaaatttaatgtcattaatagatatagggctatttgggttatctatctttttttaataagctttagtcatttgtgtctttcaaaaactttgcccacttcatctaaattgtggggtgctgagtgtttttcctgattacctgtgtattacaaggtctctccattctgactattgggaatatgacccagcccagcccttgtgatttccagaaattgttctacctttttctttccagcgttttttcactggcctcaagcagcttcctcatatgcaggcattgatgggtactcagcagaagacctgagtgggaccagcagatctctgagcactctccacaccacactgtctctgcaactcaaagaaaccactagactctgtctggacacccaggcacacccccatccctgtcctggaatctcgctccagacagtgagctcaggcaatccaggcctcatcccatttgtttcctttctctcatgagtcactgccttatgctgccttttgatcaatgtctaaaaagagttgtttcaaatattgtatctgcttttttagttgtttatgatgggcaggtaaatccaatgcctgttaccttatcacagccagaagcagaaggctactctggacattttgaatttgaggttcctgcagaataccaaactgcagatatctagcaaactgttgtaagtaatgagagaggttgcgaccagagataaattttggaagcaaatgcataaagctgttagctaaaacacagctggagggagcttctagtagaggaatgatggcatcttaaagacaaaatccactggagcagggtagacacaaaggagaacatgatgtgggaaagcagaagaaagtgagaaatacatgagaactcactgaagaaggaggtcgtggaaaccagggcttggagagtttcaagaagctgaaagtatccacagtgcctaatgccccagagactatgggcatgatgttgggaaggcaggctccaggcacgatgccatcatgctgtgagtgcacctgtactgttgcttcgtgtgtgctggccccactggttttgctaatgtgacaaactggtcccctctgccagagaagattgaggtggggtgagtgaatgagatgggaagaatggcacagaccatactttcacaaagcttggttgagaagggagggagagtagtagctagtagtagtaccagaagaccagggcaggcagtggcaaaatttcttagtttcaaagtcttaagcctgtgaacagtctaaggaagaaaagggaatcgtcagatagagcctgggacagggaaggaagagagttgatggggcaagataccatgagatgggaaggggaaagagttttgccctgggcgggagaaaagaaaatgagtgccaaagtagaaaaggtttcagatgagataacaagtctgtgatccaaccaccactctccctatttaccaagagagtttgacaacacacaggcaggtcacatgctagcctgaaggcagcctagccacagcctcagattggttcccactagctcaagcctgcaatgctgagaactgttttcatagctggtggcaggaagtcccataaatgcactgaggtcacaggcatctgtgcacagtgctcaagaccacagtttagggctgccttgagtcacccaagtgttgtgactcatacaagacactaaagaaatccatcttccatagcatctgtacctgaagcattaggttccacatagcagagggggaaacatctcgtttctttttcttttctttttttaacttttattttagattcagggcgtacacgtgcaggtttggtacatgggtatattttatgatgctgaggtttaggatgtgattgattccatcacccaggtaatgagcataatactcaataggtggtttttcagcccttgcccccctccttccctgctgtaggagtccccagtgtctatgtttgccatcgttatgtccatgagtccccagtatttagctcccactcatcagtgaaaacttgcagtattttgtttcctgtttctgagaaaattcacttaggataatggcctccagctgcatccagctggagaggacctaattttgttctttttcatggctgcatagtattccatggtgtatatgtatcatatttttctttatccagtacactgttggtgggcacctgggttgattccatgtctttgctattgtgaatagtgctgcagtgaacatacgagtgtatgtgtctttttggtagaatgatttatattcctttgggtagacacccagtaatggaattgctgggttgaatggtagttctgttttaagttctttgagaaatctccaaactgctttccacagtgcctgaactaatttacattcccaccaacagtgtacaagcaatcagttttctctacagcatcatcaacatctgctattttttgactttttagtagtggccattctgactggtgtgaaatggtatctcattgtgagaaccacatgatttctacaaagtatatctactagatctctcacggttgacagaacttggcaatctgaactgctttaagccaaagggggatttatagggctggatgcagctgcagctgtatctagaactcagaaattccaagtcctggcctctccctccatctctcaggtctgcctgatgcacaggtggctacatatagtggcacgtcccccagctttacaacagtttcagagttggctaggcatggtggctcacatctgtaatcccagcactttgggaggctgaggtggaaggattgcttgaggccaggagttcaagaccagtctggacaacatagcaagtccccatctctactaaaaataaagaggttagccaggtgtcgtggtgcccacctgtgatcctagctacttgagagtctgaggtgggaggatcactttagcccgggagattaaggctgcagtgagccattgattgtaccaccacactccaacgtgggtgatagagtgagacccatctctagaaaagaaaagttccagagttgatccatcctggctctgtgtaccagggggtacaaggtacaggtacagatgccctgcatggatcatcctgaaccaatcaccagggtgagagagactgagtgtgctgacttggtgagcccaggatggaataagcctcaccagatgcatctgggctgagagtgggatgggcagatcctcccgcaaaaatcagacaagctattattggagaggaagcagatgccaggaggccaaactgatgtcccctgcaagaaatctgcaggggcccaccccaaggcaacagctgtgggaggactgccccaggattggagcacacagacccaaggaaacttggcccaaatgtgcttttgtcttggaatttcatcttcacagggtatctgtgtgaaggagagacatggcgaggctcaagcttggaagatgtacatgtcattctggaaacacttgtgcatcattatattagtctgttctaacactgctgtaaagaactgcctgagactgggtaatttataaaggaaagaggtttaattgactcacagttccacatggctggggaggcctcaggaaacttacaatcgtggtggaaggggaagcaaacatgtccttcacatggcagcaggagagagaagaataagagctgagtgaagggggaagccccttataaaatcatcagaccttgtgagaactcactcagtatcacaagaatagcatgggggaaaccggccccttgattaaattacctcccaccgagtccctcccacaacatgtggggattatgggaactacaactcaagatgagatttgggtggggacacagccaaaccatatcaatcatgtatgctgagaaaaaccattttcattagcttcccctcgaccttccatgttgctgcaaatgaacccacagttccatctcgaaaattcaactggaactattccctttgttaaataaacttcatttaagggctgactgccttgggccctgggagaaaatgcatctttgcttttgctgagaccaatctaggtcagcaaagcaaaagctttgtattttttagagacatgaactgcagcttagatgaagaccaggggaagcatccactctgaaggtgcaaagtggagaaccgcaagtagtcacagtgggagcaggctccagaggcctcctgccgcctcccttgcccctcagccaggaaagccctttgaaacagagcatcctgcttttgcaagccgcaccagcaatgtcttcagggcagtctcagagtgctccctgctgcctggggcctgaagcagcgctttccaaagtagtttttgcagaggctgctagtttgttcaggagggagaacagacatgggggaattgaggtctctgttctccacccctgtatccttttgctagcaggagacagccatgcagtagccacctccaaaacggtccccagtgacccctgcctcttggtattgtggtcctctcccacaaggagtaggactggctcatgcaacaatagaacattgcagaaattgtggtgtctttggagagtcgttcatgaaaaacactgcagctcctgccttgctagctcttggatcatccactctggagaagccagctgaagatatactcaaaaccatcctcaaatcatggcaaggaacttaggactcctacccacatccctgtgtaggggccatcctgggactggatgctgcacccacagccaagcctacagatgaacaaacctctggctgacatgtggactgcaagttggaaaaccctgaggcaggactactcagttaagccattcccaacttcctgacctgcagaaactgagataggaaatgtccttttaagccactacattttagggtaattggttgtgcagtaataaatggtaacactccacttccagatgcaggcgaacaagtcttgtctcctcattatcccccggtacttgaaagacttgctctcactcactgccctgatctcaccctgctgggcggaagcttcctgaaggcagggaccaggttgtaattaatcattcttcctatgtctatgtccctaatatccccacacactgtaaatgctgcatggacacttactagattcacttgaatttctgtctttctggatgagagaaatcctgggagcacagctgtgcttctttctcccagaaatttccttcctcaactcaagatgagaaatacagctttttaattaacagaaactatctcaacccagatctcaagtcatttgatgtgattcggggactgcttcttgcagagacaacagttacttgcaaaaaaagcccacaagtcaatgcaactgatttcaggaaattgggtccagcaagcagcctccacatccaggagggacctcactgcagcacggatgggcagcacatgtctgctcagccaactcactgtccctgctaagccacaggcttccagccacctgctgatcagcaaggactttacatgtgtcctctacctgcctgccactctgccgaggtgtccaacacagagccccggtccccaagaggctttcattcggctaagcaagatgttcatgcagaaagatcagctacacttaaatctgaattcacccaggattggttagtgtgtcattgactaaatggtcttggagaactgagaaagggatctttgttcagggaaaatataccacaacctcccctcagggcacaggaacctcaaggggttcatggtctaatggggaaagctttccacagagggaatttcaaagggtgtgcagggagtggctggaaaggaagaaaggataatccaagttgttgagtcttcatgaacaaacagcccagagagacagaggtgacaaggagtctgtcatgacccagcatgaagtgtaagatggagtgacgagacataaggttggggcacaagccatggggatgttggtagataattcataagtgtctcacatttctgcatatctcatgagcagaggcactgttggcccttgtggtagactatcttttcaaggctatttatacagtgaacagctttggaagatagagacagatttgcaaagggcaggcacactgacagcccactatttaaaaagtaagggacactaagagttccttgcctggaacgaaacccctacatgggaagtttccctcagccctctgcattgccctggggagttagaactcagagaatcagtacacaaaaatgctggtactctactgcttttgctgtgagaataaagccctttgtttctgacccaggagccttgtgtcttccgtcagcatccatgaaactgtggcagactcacctgtcagcttgcaaaaagggtacaatcacagatctgtctcagctcctgataggagaaccctgaattccaggttttatcctgctggtccttgagtggagaaattacatttgcctttagctgtagaagggtgtcattggcgcctgtaatcccagcctttgggaggctgaggcaggaggctcacttgagggcaggagttcaggtgaaaccccatatctactaaaaatacaaaaattagccaggcgtgatggcaggtgcctataatcccagctactcacgaggctgaggcaggagaattgcttcaacacaggaggaggaggttacagtgagccgagatcacaccattgtactccagcctgggcgacagagtgagactccattggagggacatttgttggattttttctttttttcaaaatgtgcagaaatctgttaaggataaagttaaatttctctgacctttttttctgagcaggaattgagtgaggagtctacaggttagaaagaggagaaacctggtgtgcctaagagaaactagagaaggagagcccgagactcagggcccagggccactgcctggagggcttggccaaacttgcctctcagctatagctgacagcctcctagtctagatcatcaccttcctctgcggacatgggggtctgaacctccctggaaaatgtcttaggaagctcaggaggccacaataaaataccacagacagggggcttaagcaacagaagtttatcttctcacagtcctggaggctggaagttcaagatcagggagccgatggccattgtgtcctccacggcagagagagcaagcacacactttgctgtctctttttttttttttttttttttgagatggagcctcactctgttgcccaggctagagtgcagtggcatgatcttggctcactgcagcctctgcctcctggattcaagtgattctcctgcctcagactcccacgtagctgggactacagatgcctgccaccacgcccagctaatttttgtatttttagtagagacagggtttcaccatgttggccaggctgatctcgaactcctgacctcaagtgatccacctgcctcagcctcccaaagtgctgggattacaggcatgagccatcacactggctctgctgtctcttcttaaaaggacactactctcatcatgagggtcccaccctcatgacctcatctcaacctaatcatctcccaaagaccccatttccaaacaccaccacattaaggactagggcttcaacataggaatttggggaaggggcacatttcagcccatggcgggctgtcctgatgcctaaaagctcccaggacactcacacctactgacttatcccacagccccaagggactccttacgtcctcaagccaaggggaacctccagcaccggcaggctcagcctcctgccgctgggtggggaatggcagcattattgagagtgcatgaaaaatcgcaaggaggcagaagcccacctcacctcttccctcaagcacccagtgcaccctgagggtcaaattggtgacatcatctgaacacattcccttttgagctcatctaaacctaatgtcttacctttttggtcccactacaaataacacctggttattacaacaataatttctgctggaaaatcccctaccctgttgcagtcaaacgggcaattggaaaacgaaaatgttagggtgccctagacccaggagtcatagatattcttccaagacaatcaacatcagacaaatgtggtaaagaggtgagttgtcacgggtacgggatctccccaacttagtgtctgataatctagaagtttcagcaaaaacctgctcctagaaaagctgccagagcaatggccatgctggactagagtccgtgattccagctggacccactgtctgtggcggccactcctcgtctgaagggcattgtcttgggtcaatgcggcaaactccacagcagaggcgttgacacctgagaatcctacagcccagcgagtgaggctgttccgatccactcttcctggccagctgtcaaaacactctgcacctgctctcggaccataacaagtattactcatgaaggtgacagttcctcaggcccacagtaataaagacacacacacacacacacacacacacacacacacacacacacacacaggcatttaaaaaaatgcaataggtcaacaacactcaatctaaaaccctaggggctgggcacggtagctcacgcctctaatcccagcactttgggaggctgaggtgagtggatcacttgaggtcatgagttcaagactagcctggccaacatggctaaaccccgcctctactaaaaatacaaaattagccagacatggtggttcatgcctgtagtcccagctacccaggaggctaaggcatgagaattgcttgaacccaggagggggaggctgcagtgagccgagatcacaccactgcacaccagactggataacaaagcaagactccatctcaaaagtaaataaataagtaaataaatacatacaaataaaaaataaaaccctggaagcctttgccgttggattatttctgcctctctctatatttgatatagtcaatttccatctttcaatttaaagttttctcacagtggtgataaaatattgggtttgggaaagaaaatgcctgctgcaggggaagaaggaggaggctgttctctggagcacaaggagccgaggctgctcaaagttctgctgtgtcatttttcctcctcattgccgcccagtgagcatcaagcatcactggtattaggggataggaacggcttttaaacctctgtcttcagggcccgtctgccaggtgcagtttctggcttcatgtgttgagtaggttggtcaaatcaaatctcctggaccccctccgaggatgtggttgccctgggccctacacagtgatacatcacacagcttcatcccttccaattagcgcccggtacgcgaattgatgtactgagaattaacatcattgatcttcatccaagaatatggccaacaaggcataatttttttctgatcaatgttgctgatcaatgacctaatataaaaaaaggaaaaaaggaagggcatccccaggcatcagggtggattgatgcgcctctatgcatgcagttccaatagacctcagggcctgttctctgctggggattcacattaataacagacagtctttcaagcacaatgagaaacttgtgctccatgcttccaaggaaatcccatgtttctccaagagagaggggaaatcaggcacctcctatggcaaccagcctcggggcagacagaactcagtgcctgccacagctaggtaaggcccggtggcccactttatagaagtggcaggaaccagtgggctccccacgtccaccccctctaggccactgtctttgtgccacagtttattgggatcctctgtgggaggtggaccagggaataataaggaaagaaaacaatttacttctccccagttatatccaaccgaggtaagtcaagctctctgggagtctgtccacggcagaggaaattctagctccaggtttccagtgtgaaggcaaaagggtgaaattgtccacgtgttaccaatctcaagtctccctgctttttatctcctcccagggctcctactgcccccaccccctgcccccagcgcgactccattagtcatgcctcagctgcccagcaagaggctcaccttgtcacactgcagggtttatttattacccacgctgggggtatttgcatttcaaaataaaaccctgcagaaagcaatggctccatctaaaagaatgactctccattgtttgaatgtcaagcactgtggttcactggagcagggcctcccagcttggtacaccgttggggttgggggaccagcatttatgataccctggaatgacactgcttaggaagccacctttttggtgcctttcagttgatttcaggcagtcattcatgcactgtttctcgaacactgtctgtgcatctgcccggcacccacactacggatgcacgatggtgacaggcagcactgtgacaacagcatggcagagtttaccattcctgccgtcccctctgcttttggcctctcctccacaattacttgcttttccttgataaggaggagggaaaattgcaatctagtctcctaacccagatgtcaccaacaaatatcaccagatagtcactaacctcaaaaaatgaggcttaattggtggcaattttgctaagtaacttcagttccttttgtctcagtttctacctttatatggaaaaggacacttgtcacatgaaattcatgagctcatgtctatacctcactgcccagtgttgtattatttactctgcggtatgagtgtctctttccattgtaataacaaggtcactgggcagaaaatcacttcatagagaaaggggtaaaggacacctccaaaagaaaaaaaaaaaaaaaaagacaggagtggaaatcaatccctcaccttcctcaaagcagccctgtctcgtaactgccacaatctagctgtgaatcctgccatctggaagcacccccacaccctccttccgcctcgctgacacaccatcaatttccaaatgtaaccgacaatcccacctcttccccagggtctcgtaatttctctctccttttgccctctatcttatttaaaccacttgactctgtcctgcctattctggaggtgttgatcaaaaaccagttacattgtttatagagaaatgccctcagcttctggatgtctgcagtttctagtcacaacggctgtgattctttgaagtggccagtaaaccagatttttgacaggtgtggagggaaataattcccagactgaggaaagaagctgcaagccgttgtctcattccttgtgttagaatgccatcaagtgacagaccagagaacaccgctgcaaaccttgagcaccttttatgtctaatattccaagacctccctgggagagaaaatatgtaaaccaataaatataaatgccaaaataacccgtcacggtccaaatggccaaattagtattaaaggcagttcttgtccaggtgtcaagaagccttatttatttgtttatttatttatttatttatttagatcaagtctcactctgttgcccaggctggagtgcagtggcacgatctcagctcactgcaacttctgccccccagggtcaagcaattctcatgcctcagtctcccgagtagctggaataacaggcgagcactgccacacccggctaatttttgtatttctagtagaaacagggtttcaccatattggccaggctggtctcgaactcctgacctcaagtgatctgcccgcctcggcctccaaagtgctgggattacaggcgtgagcccctgcacccgctcagagttccttacattcttgaatagaatataagatggtagaaacctaacaatctgagaattataacccaattttcagtattgcaatgctgggtcatgttttaccatttggttcccgatgggaagaagccaggggcaaccctcaaagccaccagtgctccaaaaggaaaggccaacgggggccgccaggtgggtgctaaagctgtatcctccatccagaggctcacggcttctggggatcctcaagaagcctaaagacccaagagaaacaggggaacttcctcaagctcacaaagagagcagctgcaccccagccccggcccctgctgctctgcagataagtgccaggtatgaaatgagggccggtcctcggaattgtgcattgacaggcagggttgaagcctcaggaatgaggtaatggtaaatgcctgcacacacagatttaacatttttcattttttttcccctcttagagacaaggctcactctgtcatccaggctagagtgcagtggcttaatcatagctcaatgcagccccgaactcctgggctcaagcgaccctcccgtctcagccttctgagtggccgggaccacagaactagtgatagcatggagaagatggaaatgacactgtgtccagaccagaaagggggcattctacaagctgacaatctccatgtcccagcacttcagacagctgaagcccctgaagcctcagacagctgagggctcctggcagtgaagcagccttcaggccccagagcacccagagagcttctcccagggtccctctctctctagcaccagtggtacctgggctgcagggaggttggtaggggtccccagggattccttcatgtgataagctagacacggggccccaaagaggcttcagggcttgaggaagataaatatttatcagatcattacaaaggaagagtgtggctgggcaaggtggctcacgcctataatcccaatactttgggaggcccaggcaggcaggtcacttgaagtcaagagtttgagaccagccgggacaacatagtgaagccctatctctactaaaagtacaaaaattagcagagtgtgatggcgcatgcctgtagtcccagctattcgggaggctgaggcagaagaatcgctagatcccaggaggcagaggttgcagtgagctgagatggcatcactgcactccaggctgggtgatggagcaagactgtctcaaaaaaaaaaaaaaagctaaaaacaaaaaacaaaaaacaaaaaaaaaaacataggaagagggtatatggtctggggaagtattctcagtagttacaaaagtgttaagtcggcctgggtgcagtggctgatgcctgtaatcccagcactttgggaggccaaggtgggaggattgcttgaggccaggagttcaagaccagcctggacaacgtagtgagacccccaattttacaaaaatgtttttaattacccaggcgtgatgacatgcacttatggtcccagccactcaggaggctgaggcgggaggattgcttgagcccaggagttcgaggctattgtaagctatgatcaagccactgcactctagcctaggaaacagagcaagaccctgtctctaaggaaaaaaaatttgttaaatcggaacatgcaggtatttaccatcacagggaacattgaaagtattttttagctttgaatttccatgcctctgctgaaaattcctcatctgctcacctgtttgacccatctttccctctaagtttgttaatctatttataatagtattttaaaggcctcgtcttccagttcagcgtctgggtcacctacgcttctgctctagtgactttctttccatgattgtgggtcacagtgtcctgtttctgtgggtgtcgtatacactgttttttatatttcaagctggatgttgtatattaaagaacagcagagactggagaagaccaaagggtctttccatctcccagaaaaggcaccccttttcctttcaggaagctttgctgaggggttgacctctgcacagaatcaggtttaaatagcttcagatcccctctggcttcaaatcattttcgttttttgagacagggtcacactctgttgcccaggctggagtgcagttgcaatcatagctcactgtagccttgaccttgacctcctgggctcaagcagtactcctacctcagcctccagagcaactgggactacaagtgtgtgccaccacgcctggctaattttttattttgttaatttttttgtagagatggagtctcacatgttgcccaggctggtctcaaactcctggcctcaagtgaccctcccacctcagcctccagaagtgctgggattacaaacgtgagccactgctcccagcctggcttcaaatatcttgaaggggaggtgtgtcccctgcccgcagcatggctttgggattcaggcaccacaaagccagatctctgtgcttccctgctgtgccccaattccagtttgggtgattttacatcaggtcctttctctcttactttcccatattttgacctaaacagacttatacgaatataaacacatagcccctaggtctggagtcaatggctgctttcccagagttaagcacaggtcaaaataggtggcaggaggtgctagctacatgcacacactcccatgcagcctgcagtgactttctgcaaacccttcaagtgtctcagcaaacctgagaaatgcagtgaagaagctctcttaggacacagagagccctacgtttatccagacagacactccattagccgaaactatgctttcctcagtgcaatcagctcacagagtaacaccgggccagggagctggaagaaatctatagttgcattttatacatttgggatcaagctagccttaaagagtgacttttggaggctgaaagactagaaaacttggatttcagagactgatatgtgaccagacacacgaagttttaagagtccccgctgtcagaattccaaatggttagtcttaaactgacttagggcgcagcgctgcctctttacaaagagctgatacgctgtcttccggcaagcaccagttctttgattcttgtagacaaagtgcctatcacccagcaggagagggtttgaccagcagaagtgtccagtgttagcgctggcaccttaccgcctatctctgtggcactattaggcctgaggaatgattgagggctgatgtcgctgtgcccaggctctccaccaccaccctcaccagccctcctcgtcaatacacaacgtctggatcaagggcatagcagagccaggggagcatgtaatcttgagcctcagggactgttctgtcctagtgaggacacagataatgatggctaccatctctcaagctgtattacctgtgccaggccctgtttaaacatgcatcatcttgctgagtgctccaggccaccctgggaagaaggtgctgttagcaacccatgttatagacaaggccttcctgtagaaaaagcatacaggcctcatccctctcaaatgtacctgatatagatacccaaaaagcaagaaaaaaactgtgtatatttatatacacacacaaatacacacaaacagatgtgcatacatgtacatatatatactgacttcattgacttggtggattaaaattttcactgacaatgaaggcttccatgttcttattgcaggtttgctggtattcaggatcatgacctttcagcggtaaaaaaaaaaaaaaaaaaaacctactagaggccaggtacggtggctcaggactgtaatcccagcactttgggaggccgaggcgggtggatcacttgaggtcaggagttcaagaccagcctggccaacatagtgaaaccctgtctctactaatagcaaaattatagccgggcgtggtggcaagcacctgtaaccccagctactcaggaggctgaagcagaagaatcccttgaacctgggaggcagaggctgcaatgagccaagatcgcaccactgcactccagcctcggcaacagagtaagactccatctcaaaaaaaaaaaaaaaaaaaaaaaaaaaaaaaaaaactagaaataatgtttttctttaatccgaaagtggaggagaggggatacacaaaaaaatacttctccactatattgtcagaggctattagataaatggtttctgtaaatttagttgtgtttatttacagaagtcctaattttcgtggatacccacttacttaatagttgaggcttaatctttttgagcttacatatgagatttttcttgaatactcagaatagcagcctgaatgtctcagagcaacaatcaaaaggaacctgtacaaatacaacaaagtgtgaattgtagaatcaaaaagcatatgggtgttcactgtttaaatgtttccattattctgtatatttgaagtttttcataataaattgctggaggtcggaggggagtcacctgcaatgattccatcaaacattgacttctcgtggaactttcacaaagccactactgggaaaacacatgtgtatccatgtttgaaagtttatcatttatagctataaaaaagaaaaaaattaaagtcttttcaccaaatgcaatttagaaaagagaaacaaaaggaaaaatctcccataacttcacttacccggttatacaaacttttagtatattcatgtaactattgtgtatatatttggctttattagtttgtaacctttttaaaaattgtatgtaatttgtttaatggctgcatggtaatccatcatgttatagaaatgtgttagcagtggcagagaaccgagttaccccaagtaactggagacgaatccgtacgcgttcgcagcaacttcaatctttgccttgtcaaaagaaagaatttgactgaggggcaaaaagcagaaagagaccaaggcaagtttcagagcaggagtggaagtttattaaaaagctttaggccgggcatgatggctcacacctgtaatcccagcactttgggaggccgaggcgggtggatcacaaggtcaggaattcgagaccagcctgaccaacatggtgaaaccccatctctactaaaaatacaaaaattagctgggtatggtggtgtgtgtctctaatcccagctacttgggaggctgaggcaggagaatcgcttgaacctgggaggtggaggttgcagtgagccaagatcgtgccactgcactccagcctaggagatagagcaagactccgtctcggaaaaaaaaaaaaaaaaaagcaaagcttttgaacagtaaggaaaggaaagaaaaggaaagtattatacaagttggaaggacaagcaggcaacttgagaaaccaagagcgcagcctgaccccttgacttggggttttacacgttggcctacttccaggatctacttccaggatcttacattacttctccccactcctgagatcttacaggaagctgctgatcagtttcaggtgttttctatctgttaggcggctgcctgttccctagcgccagctgtggccaattactttagagaaacagttaacaaccacctgaccatcacctgatggtggcccaacacccctggtgtgtgtagcggggagccttctcctgccctgctcatacctgactacctacctactgtaacaaatgtgccatacctaggaacagtttataaaaacagattactgggacccaccttataaaaacagattattgagacccactggataaaaacgaatctccaggtatgataccaagaaatttgaaatgaaagcttaccctgtgattgtgatcctgtatttggtctgtggatcaagcaaattaagtgtgtgctaactaatcaggtaaattaatgcatttaataatgcattaattagcatacctaattacctaattagcacatagttaatttgcttgatccactatgatcaaatatagcattgtttttaagtttttgctattataaacaaaaatcacaaacatcctcacaggtatctctctgcatacagaaacattttctgagaataatcaagtggtttgtttgctttttattttttttgtttgtttgctttttaaaaaatattttaggctgggcgcagtggctcacccctgtaatctcagcactttgggaggccgaggcgggtggatcatgagatcaggagttcgagaccaacctgaccaacatggtaaaaccctgtctctactaaaaatacaaaaattagctgggcgtggtggtgtgtgcctgtaatctcagctactcaggaggctgaggcaggagaatcacttcaacctaggaggcagaggttgcagtgagccgagatcacaccattgcactccagcctggacaacacagcaagactccgtctcaaaaaaaaaaatattttaatgatgaaggaactatgttgtaattgcaactcaaggacgacccaccccaccaccatcagggaattcgaggggagactggcagttatccagggatcccagaaggagtcaactgggagttaagagtcctaacaaccctagaaaaaaactttcaaagacacaggtcttctcattaatctccataatcacagaggtcttgcctaaaagggccccccttgagtacacagctctgaaactggctaacatcttctgctgtctcatttgattttaaagttcacatttgtgaagggctctattgtacaacatggtgactatagttaataacagtgaatttcagttaataacctgaatttcactgagagtaggtctgaagtgttctcatcacaaaatgagtgtattagcatcgctcatagctcatttagccattacacaatgtatacacatttcaaaccatattgtataccataaatacatacaattcttattggttaattttaaaaataataaaagttctctatcagtcccataaattacaattttcaggcatctgcaaaggcagcatgttttggtttaaatgtggtctttccaaattttatacgtataaaataaatgcataagtgtactacatatgcaaaaactaatacataaattttataaagtcaatgcacgcggggtcactgggatgaaccaatttcagtgcctgcagtctaatgtttaaaatcaaaatggtacaaggtcaccaccaaagaaattgtttaagccaatgtttctcaaactaaaacctttggacatactcccagaatcccctgtaaagaaatgtatactgtactcaaagttgagaaccactgacttagcataaagggaccgtatttcttttctctcccacccagcacaggcccagtgctcagcagaaattggggctccacagttctgcccaacactgggtcactgctgagaagtctgcaccaggccttcctgcacctttccactgagcaatggagtttgtttattcatttatttatttatatggaatttatttatttattttggagacagggtctcactctgtcacccaggctggagtgcagtagcgcaatccaggttcactgcagccctaaactccttgggctcaactgatcctcccacctcagatacccgagtagttgggactacaagcacgcaccaccacgcctggataattttttttaaatgttttgtagagatggggtctcccgatgttgcccaggctggtctcgaactcctgggctcaagagatcctcccgcctgcgcctcccacggtgtgagccacctttgatcttattgctatgatttttttattgataaaaactaataaatattctgagtctcaagaaagctttctgaaactatcaaagggacccaggcggcgcatcactacctgtgaggccgaccccactcacagcacagactgcaagtgaggcttacagatgggaagtgccctaagcgaggttaaacagctagttagcagcagacacggaactagaacctaagcctgctgtcccagcttcggtgcccgtgctcacagcggaagctgcctcggctcatccgtaagggcgctgattagggacgacaaagacctcaccccaccgtccccgtcccatttccgccctcccagatccccaacctccttcgagtcctctccaagtcgcctcgcctcgctccactccaggccttagcaagcattccacatgcctttaccccaaccctactgcctgtcccccaaaagatgcaggcggaaaagaccccaggaagcgagcccactcctccccactgctcagcaacaccgcctacgacgttctcagtagccgaatccctttccaggcgcatgcgcccccgaggtgggcgagcgccggtgatgtcacgcatagcgccatctccgagctccgagagtctgcgacagcagctgccagtgcgtcatcagagagcgccggaagcggtccgagaatgaagagtaagcggggccgcgaagttggagagggttggggacgttaagggtcggggtcttggtactggtgggtgaaatgggtccgggctacctgttgctgcggagtcctaacagaaccgctacaggaatgggcccaccctacctaagaaaaactgagggctggagcacgggttagcctggctcgacctctgagctagggagggatgtcagggctggaggcaggttctcccggaggctgctcagtggtgtgcgatgctagaggagggttccaggccttggctcaacttggccactatctcccggggtgaccgcggtcaagatcctgctcctttctgcgagctggtttcacactcttaacctgatgcaaagcgccgagagctgctggggaatgatatcactaacccaaagctttggtccttaggggtagaagacatgtgccaaggaggggcgtgtagacaccgttaagactgggccttcaatcagaatttttatttttcatctctgccactttctacctatatgatcaagtagattgtctcggcatgtctgagcttcagtttgctcatgcacataagtgtaatgagaaaaaatatgtgtaccttgtaatgaggtttctggcaagtaatggatgttcagtaattgttagatgtgtattgttgcagaaagacttccaagtctgttactaagcacctgtaacagatgaagcaaagttatcaggccccgcaagttgctctctacagtttataatccccatcttccatttgagggagaactagatgctatatataaaacttgcaaccacattggtttgcttgatcaaacaaacatacctggctgggtgtggtgggacacgcctgtggtcccagcactttgggaggctgaggcagggggatcacttgaggccaagagttgaagaccaacttgggcaacaacatagcgagaccctgtctctacaaaaactggaaaaaaaaaaaaagaattagccaggtgtggtggcacacacctgtagtctcagctactcaggagactgaggtgggaggatcacttgaaaccaggaggtcgaagttgcagtgagctatgattgtgccactgcactccagccagggcaacagagcaaaacccagtatcaaaacaaacaaacaaacaacaaaaaaaaaaaacttgtaaccaccttgcatcaaacattctcagggaagtacaagaaagctggaattaaatttacagagtatagtgtaaattacattttctagctatttagctcataaaccaggccttagtagtcccattcttattccattcacacctgtactctgtccccagtgccatggttttcttctttcaaaaaattaagaaacagaagtgtggaatttattttagaggttgaaactttattgaccaatgtatattttgagtttaaaggaaaaacttgtattttatcagttcaggacaccatcgattatgtgacacattataatttcatattaaaatgtgaagaatctttttaaacatcttacagttaacaaaacctatttctaaccatctacatcctagacagctatatcatataacttttaatgagttaccttgttagcaagtgctcaagcttctaacttggggtattttaaaccaatgcaactcaaaatgtgattcactgacctgcagtagtatctgggaatatgttaaacactcaggatctagggtaggagaccaataatctgcattttaataagatcccagagatttttacacacgttaaattttgagaagcattctttttaaaccatgtgcttggaacttctagcatagatgtggccagagggtgggataagaggcatccaagaaagctttgctcttaataccaacctcatcttctcctatctctgaataagcagttgttctgctataagtgtagaagtgtagttattttcttttcttttcttttcttttttttttttttttttttttgagacagagtctcactctgtcacccaggctggagtgcaatggcacgatcttggcgcattgcagcctctgcctcccaggttccagcgattctcctgcctcaatctcccatgtagctgggaatacaagtgcaagccaccatccccggctaatttttgtatttttagtagagacggggtttcaccatgttggccaggccggtcttgaactcctgaccttgggtcaggatccgcccgccttggcctcccaaagtgctaggactacaggtatgagccactgcgcctagtggcgtagttattttcatagttagaaaagtcttgggtcttacagccatacccaacaagaattgatcatttcttttttttaatcccccaggtgtgatctaccatgcattgtctcagaaagaggcgaatgactccgatgtccaggtcagttcttggcagggagtccaggagcaacagaggtgatggcaaagatggctcagtagcttctgagcccccagcactgattgagatgtcctttcccacatcatactcctcatttttctggcagacatctaaggctggatcaaagtctgtagttctcattacctgttcccacgtgccagcctccttttctgttgtgccaaagtcaagtttggtaaaatgaggctttccttaaccttttatcatttcccactgtgttggggacaccaggctgtgcccacgtggtgggcagcatcattcaaccttgtcactgtgccctctgcacttctgcagaaggtgtgcaatcacatatcataagtgaaatttacagattatatctgaatgcctcggcctgctttgtcagttttgcaaaagttcctcttgtggctcataatgagagcattaccttgaaagcaagattttgaaagaccagtatacctttattttgcttctccatgaaagatgagccactcaggtatttaagagaatcagatcattgtcctattatagtcacaatgacgagagtgaattaatttttagttagcatctacaggtgcaaagctgaagcagagttcccaccatcatactgtgagctccctcgaaggctatatgtaccctatcttcccatccccattgctctcccacagaaggaaggctgcgttactattgacagatcagcatcagtctgtcagcctcagtcttagcatttagcacctggctagtgcaaaaagagctcaggaaacagcccagccaggagacaggccctcaggagagagaactgcccaggtctgtggcaggcatgagggcagtggcattgccaccaaatgaggaatccgttattggaactccaacctgagaggtagtgagcttggagggtttctttgtttgtttgtttgtttgtttgtttgtttgagaattgcacacaattacgacagtcatttttcccagaagtcctctctaagagcctgtgctcattcatggtaagttgacgccctgctctcagtgacacccttcagagagagcgagcctggggcctgagatgctctcgacggtaccttcctccaagtgatggtctgcggggcgggagcggaccttttggagagtggccacaccatgcccacagagctggaaacccggttaaggagtattgtcctaagggcacagtgtcagggtccctgcgccctgaggcttggccgaccctggagccctagttttgctgttttctgtagtgttaggatcacttcctccatagcttagtgctactctgagctcactttcatctggtcatgcctggttgaatatatttgttatacatttctcaagctttctcttctgccaaggatgagagaattcttcttcaagatagaaaggttttggtcctttcagaataacctcagaaaagcagggccagagcaggaagtgagcgtttgacacgctgttgtgtgtgacaaacggtcatgaattggtgtgtgagtgtgacttacatctcggcagctgtgggtagcagatgcatggcggatgagcaggttgagagcctcagtaggtaaagggatgggccccatttgctcttgcagtagctgccgggaatggcgggcgggatgcctgggatcctgggctgcccagaccggagcagtgagcgccgcacccccttgtccgcctgcagccttcaggagcacagcgggccgaggccttcgtgagggccttcctgaagcgcagcacgccccgcatgagcccgcaggcccgcgaggaccagctgcagcgcaaggcggtggtcctggagtacttcacccgccacaagcgcaaggagaagaagaagaaagccaaaggcctctctgccaggcaaaggagggagctgcggctctttgacattaaaccagagcagcagaggtaacccgagctccccacgtctttctgcccgcggtgcttacccttcttggtgtgtgaacttggctgagtggctggggaggcagcctggctccacctaagctaagggggcctctctgtcgtctgccacaagagggcagccttcctttaccaatctgggctgtgttcagcgaggcgggtgagacaggactcattgtctggcctctctcctcaccttcaggagtaagacccgtgcaagtacatctgttgcccatggcaacaggctgtttgtccttcggctttgttagacagaaaagaggaactgatatgtttttagtgtgtattactttgtagcttttgatagagccagacagtcacccactcgggtttcattgccaaagcaagatgttgcccacacgtttcagaagtttccaaaaggaatgcatcactgtcctgtcctgtgggaggatgtcttcctccagccgacccgccatccctccttggtgacgggtctgagtgtgggtgtcttggggctgtctgtaggcttttgcttggagatcaacggccaaatagcctcccacgctccagaagacgcttaaagtatgccatgctgttcccggccccactcaggagatcagctgggcctcaggtggagaaggggctgctgcctcccagggtttgcctcccgggtggagcccaggttgggtttgagcttaaggtcctcatttctctaacctaaggctttgtggtaacggattccccacaggatatcaagactggagataatggcccagaagaacgctgttggggtccttgcccctgctccccgcttcttctccccaccacttgcttgcccaccttccagaccagcctgctgcctcacatgaggacctgcgtgacaaccagcaacccctgctttactgggggcttactaggttcaatttcacgtaacagaaaacctcaaaataacagtagcttcaacaagactcacgtttatttctctctcatgaaaagaagtccaggtggacaccgccctgggctggtgtggtcctaccaatgaggaaactgaggttagagaggtgtaggttcttggtctcggttatcagctcaattgctcatcgtcggatttgcacatagttcctaatgatcccaggttgcagttgttggcatcaagtcaagctctgtgctatttggacattgtcatcccaagctcatgttgtctaactttttccctgtttctgactttgctgcagatacagccttttcctccctctccatgaactctggaaacagtacatcagggacctgtgcagtgggctcaagccagacacgtaagttgcattcctgaagctttgctctttggggtggatctcaagcctctgatcattgtaaatgcggcttcaggaaccagcgttggtattgcctggctgcagacggttaaagacctagttgcttcttttggaactttttatcatgatgtaaaccaagggcttctgtttaccctgcaggcagccacagatgattcaggccaagctcttaaaggcagatcttcacggggctattatttcaggtaatttacctaagagcgtgtagcacatggccatccagaggttcactctgtcactctgtggagacccagggcgtgtgttctgttggacacactctttaccgtgtggattccctgagatggcccccagtcaccatcatccccacgctaagggtgggagatgcttctcgctggctgtcttagccagtccggccatttgctggacacaccctaagtggtctctgtgtaccttctccacacagggacccctgttggtaccctaaagggcacagtggctgcgagcactcacccacggcctgggatcttgaacacagaatccctttcatccaatgctgtggtttcaaatgtcagctacacctgacagcccccaaggtgacatctccagcgtaggcctgtcccctgaactccaggctcaggcatccagctgcccacttgacatagccacctggatgttcagggggcatctcagactttacatagccaaagctgccaccgattctcctcacagcaacccctcctggtcttttccatctcagttaattactcagttatttacactggttgttcagaccaaaaacctaaacagtgtctatgtttcttctttcctaatctcctcgaatccttcggaacatcctactacttaaattcagccactgtcattccccagattacctcagacacagctcctcaccgcaccaggcagccagagtgccggttacgtagaaatcagagcacgttccttccctgcttcaagtcttctggcagcgtcccatcgtatgggagtaaacctgcctccttgctgtggtctaaggcctccccgctccctggggcagcaggcctcccacactgccttcctcctgccctgcctcagggcttcgcctctgctccttacctctacccgggagttctcctgtgtgtgcacagtccagcttctcattgttcagccctgctccaatgccactcccctcagggtctaccattgcaaaccatgaccctccacacattgccctgtccctactcttcatagcactcgttgctgtcagaaagtagaatggtgtggttcaccgtgcatcaccctgccttgctagaacccgggctccgtgagagtaggatccaggaccgcctctttccgtgctgtgtccctggcatctcctgaggatggtgcaggcattccacagctgcttggtgactctgtccgctacactgaggctcgggtcaggacgagggaggggctgctgcttgtgatggtggctcatctcgcagtgctggctgctgggcagctctgcagccacactcacgttccagccagcatcctgggcagtgcatggtggtgtttgtgcagatcctgcaagggagacctggctgcatcagagcagccagcccgtgggccctgatggtgctgggcacatatgtgacctttaattccagaatcctgcccaagacccctgtggccacagaccctccgaaggacacctcataggaacagtccagaggctgcaaagccccaggggaagcctggattcttgttggttacatcagggcccagctgttgagcccccaccccctgggtgctctgttctttcatctgctagctcagagggtgggatcagcacccccaacccctgaggcctgcttctctgtggttcccccagcaccacagaggcctgagcctggaactgtcctttttctttgcagtgacaaaatccaaatgcccctcttatgtgggtattacaggaatccttctacaggaaacaaagcacattttcaaaattatcaccaaagaagaccgcctgaaaggtatgtaggtgtttctgagggcattgcttgcgggctgtggctcccagctactgcgttagccttttcctcaaggctccaagagtttgatttgacccctcaagtcagcgcagattgcagatacttgctgaacctgcattaaagcctgcagagaccatcccctgcacccgtggctcccccaagaggtgtgtgtcagtgcagcctgcaaccccggccagaaatggccaaggggaaggaagacctgctcggctgtgcctcaggggacctgggtctgtttaggccccaggagagggcctccacctgccccaaaggctgctgctcccagaggaatgtagccaaacaggcagcagggtagaaacaggagtggcgcctgtccctggagttctgagctgtgtccttggcgataacacttgggttccatccgtggccagcattgctctagcagatactttgggtcagccaggatttctacaccccgccttacccacaaatccagagatatcaaaccatagttagaaggttttgttcctttaatttttcttttttttttttttggagacagtctcactcttccacccaggctggagtgcagtggcacaatctcgactcactgcagcctccactcccggattcaagggattcttctgcctcagcctcccaagtagctgggattacaggcacgcgccaccacgcccggctaatttttgtatttttagtagaggcagggtttcaccatgttggacaggctggtctcaaactcctgaactcaagtaattcacctgcctcagcctcctaaagtgctgggattataggtgtgagccaccgcgcccagccttcttcctttaatttttgagcttggtttttcttgttgcttcccttattttcctacatatccttctacctcacattgtaaacctcggaaagtggtgtaatagtttctccacagagcataaggccaggagcccatctgaaagttaatgtgggaaaaccagtttctggcaggtgttctgggactttctggttctgggaatttggtgtatagcctttgaccctgaagattaggtgccaagctacatttagcatgtgactagattgacctgtggcagaataaccacaggcaaccctaatgcccctccccttgtgggtttcccgtttcctattagcttatttttttcattcaatgtgttctgaataatattctacctaaaagtaaaatattaataaatatttttcctcatctttttttctcctgcctttttttttttttttttcagttatccccaagctaaactgcgtgttcactgtggaaaccgatggctttatttcctacatttacgggagcaaattccagcttcggtcaagtgaacggtctgcgaagaagttcaaagcgaagggaacgattgacctgtgaattctttgccgtctaaggcagttgtttatgacagctgaaaactggacactccctaaatgtccacctttcagtgaagagatagttaagccaattccatttatagaccacctccagccagtgacgctccgagttgaggatgttgaacaacatgggaaggtcgcagcgtactaagtgaagaagtcagaggacagaggaatttctctttctaggagattttcattttgtgtgactcccatggggaggaacagactggcaggaagcacaccggggttaacactggttgacttgaataggattattcgatttttaaaaatacttttccatgttttctgagtgctctatgataaatcagttgcatctgtgataatacagtacatatgtggacataaacagggatcaaataaaggaggtattgctgcagtccagccaggttgaaagggaaggggggtccccaaaggtccattggatggcaggtgtctacagaggctcgcctttgggtggaactctgacccacctaaggtttactttgctatttcaggaaggttgaagaggattgaagggtgagttgctaagtgacttagggtttattcacttcaggaatcatagctggggtggaccccaggagcagagtactgcatgcagctgtgcccatgcatggttgccccagcgtagtgagatgggacctgccgcagcatgcccactcctgagctgccaggctgagccatggaggactgaaaggaggtcgcccggcatcacctcccgaggtgagacctgctgcaaaagccaagccagcagcattgacgccctttgatatcttcgccatttttgctgctgaaagacttggcttttcagtctgaccctggccctctgtgaccatgtgtctgtaaagccagtgggtcaggcccttccatgcagggccagaggaaaagcgggcccagggctgcagtgagagcggggcaggggaccagcctaccagatgggttggaaacatggctcagaaggaccaactaccccttccctttgaggagcaagtctctgccgatcagcaaggcaaggccaggagccctcctggcgaaaggcaggccacaaatctgttctcccccaggagaagtagcagtgccagggctttgcgtttctggtaacttccacccaaaccacaccagagagaaacaccgtagtggagaagggaagtgggagcgctgactgctgtgtgccaggagagtagaaaggcccaggtctgtgccaccacccctccccaaagctcagtgcacccagagtctcacagggaccaacacggtgcctcggtcctgcttccatccatgcaagtgtcctccgctcaccagggtgttctgaggcagctcaagtgctctcccccaagcagcacgcagtcaccgctgccagtgatgaacacacgcacgggctaggcacatggagcccaagcacactgccacctcggacacgggccccggcccagcgactgccttgtggtgtggccgtcctcatctgccacaggaagacagacttcgagggacctcttgcctaaggcctcgctgactcaagggtagattgagatttggacctaataggctccagaactgtgctttgagctacagggtggctgcaggatgagacggatgcagttcaaagtgcaggatgtgctgcctttattacctgctttcccgctgagcaaatccctgtcttgagtgggaagtggcatctattcccccagccatctgaaaatgctgtgttcataaccaaataggtgctgtagcttcctagccatcccgctcttacccgcccctctgcaatgtaaaaggcgtccactgttgtgtaaatacacagttgctttccagaaaagttgtaggtaccacttgccatgtgaaatctgtttttcatttagctcagactcaagtttctgtgtgagtggcggtttaatttgtagatacctctccctctcccccaaggagacatggtgagggtgctcaccggccactaagctgccgctgtgcctgcctgtttctaggatacactgttgccctcatggcccacccaggggtcatatctcccaggtagaggagggaaaggggagggcccagctgggcgggacatggttcctgatgaggaacagctgcagaaagcatgatctgaggcccaggggccgtggcaggggccagggctgccatgtctccacaggctgcggcacagcttgtcatggagggtaatgtggtgctttttggcccgatctctcccatgtccactgtccaaggagcaggaccctggcagagctgaggccttggccatgtggtcccacgggagacagagccacattcgacttgtgtaagcctccatgcaccagagaaagtgccaaagaggagagagtggttagcaactcaggacaggacccagaggctgcaggactgggagacatcagcccagcgacccactgctcaaagagtggggcccaggggccctttacatcttcccagtgcccagctgccacacagggtctgcagaggataggccagagcctcgggggaaaggatgaggttcttggaggagaaaggacagcgaaaggacagcgtgggccatggctgatgtatccatctgctctaatcttcataacaaaatgccacacactggggctgcagcattttctcacagctcttgaggctggaagccaaagatcaaggtgctggcagggctggtttctggagaggcctctcccttcttgtcctcacatggcctttcctccctgtgtgcaaggaaagtgatccctcgggtcttttccttgtagaaggacgccagtcctattggatcaggccgtgttcttatgaactcgtgaaagtctccagacagtcacagtgggggcaagggctttatcatatgaatttggagacccaagtcagtccacagccaccccgaagctttcccagccaggacagcctggttgtgcctcccagaaagactccaacagctacctgactcccaacctcagacactagccaggccttctctttcccccatatgggctgcttggaccactagccagtccagccagccccaatgctggcccctgagctgccatcaccactggattctgtgacatgctcatacaggaacttgggtccagggctgctccctccagtacccggggcccctgagctgcccagttccccttcacttttgcaaacagctgaactcctcctcccgctggggccaggcacagtctggatgggggaggaaatgcgtgtgcaggtgggcaggatgggcagagaagtctccctggagcaggggctccggctctaggcagctgtgggtgtgaagagtgtattcacaccaaggctcagggcaggagcccgcagaagcattgtggaggacccaggaaggcaggggaagcctgcgagggtctgccccctgggctcaggcaggcaggaggagaggccggaaggggtatatggctgccaggagtggagagatggcagagatgctggaaaagccctaatccatggggcaggaggtggagttctgctgatccattcacgcagttctgaagtcttggggaccttggtgccgccatctgtcaagtggggccattagactagacccagcgttcctggaatggcatcctggaacttcccatatcagagttagtgggtgcacattcagagcagccagaccctgggctgcacctcagacctactgaatcagcctctggcggcgggacccagatagctgtgtgtttacctaagaccccagctgatcactgatgtttgaggacgctgggctccagatggtgtctaaagtctcttccagctctgaggtctggactgtgatttcagacttgggactctcaggccaacgttttctggaggctgggaaagatcatcaaatgactgatctcccaggttccaaagagtaaacaggaacatccctccacaaagccgtaaattctggtaaaaaagctcgctttctggacaatggctttagctttaatttagtttgcatttcttagctataatgtctaattaagacatctgttaaatgtctacaatattaatagaaggggttctaatagaactgtattggaattgtccatttaattaacctcgtgagcctttaatggatgtcttaaatagacatcattaacaagagtgctagacaaattaaaattagagtcaataacattcttggtaatttttcctgagctgtaaaggacaagccttgctaactagacaggcgcagagataggctgtgttcacaggagggtgggcgctgctgtcctagagggcatctgaaatggacaggccccaagtgggattcagctattctgtgtcttggtccactttgcccataaaagataacctccagccataggaggcaggtctcaggagcaaagacctgcccttccctatgccttttacagaaaacgtttgctgggccaggcgtggtggctcacgtgagcctataatcccagcactttgggagactgaggcaagaggattgcttgagtctgggagtttgagaccagcctgggcaacatagcaagaccccatgtctacaaaaaaaaatttaaaagttgagctacacatggtggcatatgcctataatcccagctactcaggaggctgaggtgggaagatcacttgagcccaagaggttgaggttgcagtaagccatgattgtgccactgcactccagcctggatgacagatgagaccctatctctaaaaaaaaacaagaaagaaagaaaaagaaaaagtggcctgatccatcagagctcctggaggagggactggcttaggagggagatggaggaggatataggacctcacccagagactcacaaaacgccagatagatgcacagactgggtgaaatgcaacagactgggatagggaaggatttcctgggacaggccgggagcaggatgaaatggaaaacattccattcttttgcctccaccgccccactaagccactctcactcaagtgactgcgtctctccagagccagtggtcggttctccgcctctgccttgcctggcctctcatcggcatttaacaggtcatcccttccttcctcctggaacacctcttatccccacactcccaactttcctcctgcctccctggctactccctctcactgtcctttgggagctcctctgcagaacttctcagtgttagaatgccctgagctctgcctttggacttctttccccattccctccatagctgtctcgtccaccacttcagatccaccagacccacatgtgtaacttggtttaccatctgcctcctgccagctagaacggaagttcctaaggacaggactgttttcctcactgccataccctcactcatccagagtgtatctgactgtattcagtgttctgtgactgttgaggaaatgagaaagctgcccaccaggctccacctggagatctaacaggcagcccagcatggtgggctgcacacagcatgacggacttcccttctcttcccttccttccacccgcgcttctgcggaggcccctcgcctcttggatgctcacacgggaaaccaaggagccatcctgattcctcccttgctttcacgcccccaccaacctttcatcacgacatggtggccctccttgcaaccctcccaccacctgctgctccagcccccttccacccacctgccagcacccagccacagccacagccccccgctggcctccctgcatccacgcctggcctcactgtagcccgggtgacctttgtgaaacatgactcggggtgcctctcccgctgaaaacccacaagcgacttcctgctgcacgcagaatgagagccagcccctgatcggcatcatcaaggcccttccagatcagaccccagcccacccctgccatcgtggtccaccttcccgctgcaccctgtgcctctctacacccccaagcatgcgattgtccccgtgcacatctgtgcctgccattccttcctctcgagctttctcctgacccctcaatctgcaggcagcctccctgcgttcagctctgcacacagggaaggccccatcatcctagctctgcagcccccaccccaaccagtcactctgtcacattactctgtctgatatttccttttcctttttttttgagacagggtctcgctctgtcacccaggctggagtgcagtggtgtgatcatagctcacttcagcctcaacctccctgacttaagcgatcctcgcacctcaacccctcaagtagatgggaccagaggtacatgccaccatgcctggctaatttttgtttgcttgtttttttgaagagctgggggtcttgctgtgttgcccaggctggtctcaaactcctggccttaagcaatcctcctgcctcagcctcccgaagcgctagaattacaagcgcgagccactgcatccagcagtcttatgttttgtgtaccacttctcagtccccagtgcaaccatatctgcctgtttcatatcattttcttccactggaatgtgagctgctcggacgctgggacactgcccatggtgttcgccgccataaccattgtaagccccctgcaggggagaacactgccttgcatataataagtgctcagtaaatatttgttttctgacccaaaaagaaaaaatgagcccaggatgtgcctctaataatgttgaataagggttggcacacagcaactgcaagtggtgctggtcagtgacccctgtctgggccagatgagcccgtgtggcttgcccagggcagggcagctgcacatcctgagtccaacgtgccacccccccttccttgtcggtgggcacccctggtagcaggagccgcgggtgagaaggcagccctgtgccactgggccctggcaccccagctatgcagaccgaggaggttatgctccatcaacagctgtgacgtgcagcaagtgtggcccgcgcttctctgcccctttcagtttcccccatgaagccccagggtctggcgggagcagctatggctggcgctgcatagcctggcctggagaggctgagcccagcaggaaacccgagtcaggaaacccaagttcaaggcccaagttccccgagaccttcggttccaaccacagagaacgtgaagaaagggagtgtggtgtttattgcaggcacatttaatctacacaaattaaactgtatcctctaccaaaagagagggagggaggggaggaaagagaaaggacgctgtagagagtgctgccagtggctctgtcctgcctgtagagtgctgccagtggaggctcgccttgcagcgaatgtgagacggaaagcatcctcagttgccctgctctcccaaaaaagtgtgcgattataatgctttgtataaaaaaacacaggccccaaacaggtgctgtgccacaggggcttgtgctggctcatgagagctgatgtgtgcacctcctgcagacggcacattcatgccggcaccctgcaaccctcatggtgggaacatttacacagcaatttacactatgctacaaaccagggcttgttacacatgtaccagcatcccatcactgccctaaatgcaagctggctgctctgtgtgcagaacaggctgtgttaagtcatctttagggggctacctagccccatggaagatggggctccgtggcctgggagctggagacagagcgcttgctggctaaggcaggggagattgcaaacagaggatgtgtgttttctcagggcatatgttatacttcaatttaaaatgtttgtagaagaaccatttggactattatgtgggtgcttaataaatatctgaaatcatttgagcatctctccagcagtctcatttcttaatggtaatgccaggccaggcatgatggctcatgtctgtaatctcagcactttgggaggccgaggcgggtggatcacttgaggttaggagttcaaggctagcctggccaacatggtgaaacccggtctctactaaaaatacaaaaacaagctgggcgtggtggcaggcacctgtaatcccagctactcaagaggctgaggcaggaggattgcttgaacccaggaggcggaggttgcagtgagctgagatagcaccattgcactccagcatgggggacagatcgagactctgtctcaaaaaaaataaaaatggtaatgcccaggttaccctaagtggctcttgcttgaaaaatcacagatttaaagcaaggaaacccacattcctaagaaatgcagtatgtcaccaaactcacaattttaacagctccctcctttcaaaatacgggctcttccgctaccccagaactccagggaccaagtgctctgcagccctgtcactagggcgtggttgccacagccctcctggtcccgccctgtgaggtttccaattgagtagtgagagagtgagtggtgatgacaggaccctggggccacagggtgcggtgggaggggaacagggcctgtggcagaggcccctggcaggtctgaaagtaggctggcttccctcaggacctgaacttaagacaagccggagggctgagctggagtcaggcaggctgaggcctcctgcagaggagctggggtaggaagtggggcctgcaggggcatggcgctgaggaggctggaggcttcaggcaccaggcagggcagcaggaagtgaggaagactggcagtgaactggagaggccaagggccggaagaccagctaggaggttgtggccggtgctagacgtctgcagcttaaccagggtgtcggccttggggatgcacggaaacaggtttgagaggtgcacacagcacccacgaacagggcctcagggacacagcccctccagcctcggtctgggtgtctactcacagcccagtgccctgaagggtggcagccccactaggcgagtggagatggctccagccgtccaagctgctgaacaaggggctgtggacaaggccagcgtggccaaggaggcaggggctgcagctgaggtcttctcaggggaaaagggagcaggcaggtggggagacacccttgggcagacagaaataaggaggaagatggcagagctgggtcgcaggggtggggagccgtgtgggcatacctccgggtgttgggcaggctgcagccttgtctggcttagctttgtgagttcagtcaagggtgagcctccacccatgccttggcgtcctcatctgtaaaatgagcatcaggaataaagcacagccaataaagtttgtgtgtgtggtatcacccaaaaactcagagggttctgacagaatacagtaccatcttccaaacataggggtcgggcattctcccaaactgtccccttgggccaggtgtggtgccttatgcctttaatcccagcactttggaaggctgaggcaggaggatcacttaagcctgggaggttgaggctgtagtgagctgtgattgcaccactgcactccagcctgggtgacagagcaagaccctgtctctgaaaaaaaaaaaaaaagaaaacccacccacctgtcccctccatggctgcattctcagtaggaccccagaatacccccaggtagtcagcactggtggctggctgaggacactgagatgaattatccccggatcacatggccagtgggtgagtcacatggcaagtcccctctcaccaaatcagctattcttccagaacttgaggaagacttcctttcaccataaatgtaaagccccgttgcctgccagggtgggaacaggactattttttgcatggcatgaacccctgccagctcctgcctcctggcggtgcttgccgcagaatttacagaataaaataactattgaacaccctattatccggctgcctaattaatgtaaatgatagttatggtccccacaccgtggcatatgtttctcggaggaggccctgccagccgcctgggccccattccaggggtttttatggtagcagccccattctggctccattgagtaaaaggtaagttgtggccctaaataatgaagacagaagagctaatgggctcggtgaagaagggcagctcaggcgctggtctccgaatcaggtgacagaccctgcactaatgtggcaggccaggtctcactaacgcaggcctctgtaacacctgtttcagcattgactgagtggcgaagttaaatattaaaagctgatagagccagtgccctatacaaaggctggagtgtaacaaaagcccaccaggagttttgcccaggcctttcctgggccttgaagcatgacaaagtaacaaaggaattaacaggacccattttaagattaaacaagttgtatcggaggcctgaagaaactccccagacctccacaaacaagtttactggggatctgaaggaactccccaaacctccataatttagcaggagacaaaataagggtaatcgccccagcacctggacccatttagattaagtaaatttactgaggcttcagaggaagatcttcaggactcagatcttagttctagattaaaagaagttgggctgggcgcggtggctcacgcctctaatcccagcactttgggaggccgaggtgggtggatcacgaggtcaagagttcgaaaccagcctggccaacatggtaaaactccgtctctcctaagaatacaaaaattagctggtgtggtggcgtgcgcctgtaatcccaactactcaggaggctgaggcaggagaatcacttgaacccgggaggcggaggttgcagtgagctgagattgcaccactgcactccagcctgggtaacagagcaagactccgtctcaaaaaataaataaataagttaatcacttatgtctttagatgaatgtacacttacacataaacatatagcttagaaggtatataaactctgaaacccgaattttgagttggtctggtgacatttcctaggccttcttccccataactggttacagaaataaaaactcccttcctccccagttcatctgcatctcgttactgggccgtgagaaatagcagcccaaccctcaatttggcctggaaacgctaatagacggggtctttccttgcagacccgagtgctccacggacccccggtgcaacagtccctaggactctggaacagagacacagaggaggtgtttctcccagagcgctatacacagaataaaatcctatgaggcccatgtggcctggcccctgccctcctccagcctcacctcatgccaggcagctgcctcctctcctctggctcccagcgagtggcccatcctggccagtcttgccctggccttccctagttttagcacaaaccagagcagctggtcaccctactccagccccaccagctaggcttggtctcagggcatgggcccaggatggtcttccccattctatgtgtcttagtgcactggggctgttataacaaaaataccaaagactagatgatggataaagaatagaaatttattattcacagtcctggaagctgggaagtccaagatcaaggttctggcagatttggtgtctatcaagggctccttcctcatagacacgtctcttctcactgtgtccccactgggtgtggcacactgggtgtggcagaagggataagagagctctcggccgagcgtggtggctcacgtctataattccaacactttgggaggctgaggcgggtggatcacctgaggtcaggagttcgagaccagccaggccaacatgatgaaaccctatctctactaaaaatacaaaaattagccgggagtggtgggtgtgcctgcggtctcagctacttaggaagctgaggcaggagaattgcttaaacctgggaggcagaggtttcagtgagccaagattgccccatttcactccagcctaggtgacaagagcaaaactccatctaaaaataaataaataaaataaaataaagagagctctctgtggccacattttttttttttttttgagacagagtctcactctgttgcccaggctagagtacagagatgcaatcttggctcactgcaacctctgcttcctgggttcctgggttcaagcgattcttgtgcctcagcctcccgaatagctgggattatgggcatgcaccaccacacctagctaatttcggtattttctgtggtgatggggtttcgccatgttgcccaggctgctctcaaactcctgacctcaagtgatccgcccacctcggcctcccaaagtgttgagattacaggtgtgagccactgctcccggtctggcctcttttatagggcgttaatccctataaacactccatcctcaggacctaatcccatcccacagcccccgcctcttaacagcctcacattgggcatttggttcaatatatgaattggtggtggacacaaaatattaagtcgatagcagactgttagctcctcagggggcagaccgatgttttaggccttcccagaccaccctaagtccaccagtcaccatctccacagtgctggagagagaagctgactctgcatggctggtctgcttccgtcctgtgggaggaggctgggccctgcgttggccgcccaccccagccctccctctgtcacagtagcacttgcaggaagaggtggggctggcctttcttagaaagagcctgtgtccaaggccaggcacagtggctcacgcctgtaatcccagcactttgggaggccgaggtgggcggatcacctgaggtcaggagttcaaggccagcctggccaacatggcaaaacaccatctctactaaaaatacaaaaagaagccaggcctggtggtgggcacctgtaatcccagctactcgggaggttaaggcaggagaatcacttgaacccaggaggtggaggttgcagtaagctgggactgtgccactgcactctagcctgagacagagtgtccctctagacagagggagactccatctcaaaaaaaataaaaatgaaaataaagccaacaaaaaagaaataacctatgttcaactcggtgctgctcaatcctggctacctgttacaatcacctagggagttttaagaacaccaaagcccagacttcacctcccaaagttaatccagaatccctggggtggggccttgccatcagtatatacatatatagacagagagagggacagggtctcactctgtcacccaggctggagtgcagtggcgtgatctcggctcactgcaacctaatcttcccgggttcaagcgattctcgtgcctcagcctcccaaatagctgggattacaggcatgtgccactacacccagctagtttttgtatttttagtagagacggggtttcgtcatgttgcccaggctggtctcaaactcctgacctcaggtgacctgcctgcctcagcctcccaaagcgctgggattacaggtgtgagccaccgtgcctggccagcatcatatattatcggtgtatttttaatctacgtggcctagggcaagtcacctctgggagccagagcttccttgctgtagaatgaggagtatccaccctgtgctgtgggagtaatgggggccgggcacagggtaaacacgtgccatttgctgtcctggtgctttctgttgttgaatggacagttcagaacctccagaaatcaccctgagaatctcaggctttgtaacagcagtgtctcacccaggtctccgaggtgaccacggccactcacagggctgcaggctaggccaggtgcccctccaccaaggacccagacaccaggagcctggatttgccaccactttctatgctgtgttataaacacaaacatgtgtctgcctccttgactataagctctgatgaattcgcccctgagtcccaggctcagcgcaaaggccagctcgatgcaggggctcggagaatgagtaagtgaatcagtgaatgtgcccgcagctggtgtgatcaggaacttttgggtcatttcagggccgtctctggggcaggatggtgcttctgagaagggtccctggaccaacccacccaggagccatcacaggccaggtttctgtcccagcatgccttgcagggtgtgcctcggactcacatttccatagaaatgaaaagtaaaataccaaagtgcatcgcacatgtgtcaggtcgcttctatttcctcacattttattttaattatatgtgaaaaatggaggtcttggccaggcgcggtggatcatgcctgtaatcccagcactttgggaggccaaactggatggatcggctgaggccaggagttcaagaccagcctggccaacatggtgaaaccccatcacttctaaatgtacaaaaattagccaggctaattttacaggaacttgtaatcccagctactcgggaggccgaggcagaagaattgcttgaacctgggaggtggaggttgcagtgagctgagatcatgccattgcactccagcctgggtgacaagagcaagactccatttcaaaaaaaaaaaaaagaaaaagaaaaaagaaaaatgaaggtctctagacagcaaggggactgcactggtctattccaggaagctctgcaacagcaccaggcctgagggacagtgacaggtagataaatagaaaaatgctgcttaggagcagggttgcaagcccacaggatcagattgtcaagtttggagctgaactccagcctaggggtattttttgttttttcattttcttttgagacagggcctggctctgttgctcaacctggagcgcagtgacccaatcatggctcactgcagcctcaaactcctgggctcaagcaatccaccctcctcagtctcccaagtagctgggactacaggcacacctggaaaattattttatttttgttaaagaggaggtctctgttgtgcaggctgttctcaaacccctgggttcaagcgatccttccacctttgtttcccaaagcgctgggtttacaggtgtgagtcactgtggctggccccagcccaggttttcctactccactgccttgtacctggctcacccccctctatagaagcccatgatctcttctggttcaggagcaccatggtggtgtgtggcttctctacactgtggtcccatgtggacacgtctcagagctgccactccaggagacactgactttggcctgtggccatcgagtgcatctgttggaaggattttgtttgcaagtgacatagaaccgaatgtaaactggctaaacaaaaagggaattcaatgaaccccgtaattgaagggtcagaatagaaagtgctaccttcaggaatggtttgatccagaggatgaaacagcattccaagactgcttatttctctccatatctggctctgtgttgcctccttgctcagcaggttctctcttcatagtggcaagatggtagccccagcctcacattctctcaggctagctgacagctggctggggaaaagagaaatgttttctcccggtagcccttcctccagtgtcagaatttcttcatgctggttggatctttatgatcagttccgcattcctgcactgctgctggagccccagggcactgattggccacatctgcatcataggcttctgttctggaaacagagttctggaaagtgagtgtcaggaaggaggctgttcctctaaaggaaatcaaggtactttttttttttttgaggtggggtctcactctgtttcccaggctggagtgcaatggcgtcatcttggcttgctgcaacctccgcctcacaggttcaagcaatcctcatgcctcagcctcccaagtagctggaactacaggtgtgcaccaccatgcctggctaatttttttgtattttcagtagagatggggtttcaccacgttggccaggctggtctcgaactcctagcctcaagtgatccatccacctcagcctcccaaagtgctgggattacaggtgtgagccactgcaccgagccaaggtgctattttttaaaaggagggagctggatgctgggtggcaataataataataatgtatccattcctctgagctcctgaagtaacaggtgcagcctaatgaggggtccttggggaggattggtattgtgtggacccacatgagctgcagctgcatttcccagcatgtccttccctatgcagttcccagttcgcatgggttgggccacaagagacattccctgagatttgggaggcggaagtgacgcagcagccatcttctcagcattctggaggtccaaggcctccctggtactctgggagactgcataaaacacccattccatgatcccatctgaggtgaaggagttggggtattgatccaccagtgccacttggtaggggccatcccagaaggtgttaatcccctggcatttcctgatgaccatgaggtaggcacagttgcacactggagctttgcagaatgccctcaggtaaaaagatgcagaaactttaatttgcaggctatgggcagggcaccagcagtgcctcctacagagcactgattaagtcactactgagtgctctacaggtaaccccttcaaatcttagcaacagcttcaagaggcaattaggaacatccagattcacccgtgagcctcaggagcttgtccccccctgggaagatggaacagtagggatttgaacccaggatgtctgagccactgctttccccaacaaaactacacaaattcagtggggtcattccaggccaccaccaggccctgctaactcctcaaagaagaaaagccaggctgggcgcagtggctcacacctgtaatcccagcactttgggaggccgaggtgggtggatcgcctgaggtcaggagtttgagagcagcctggccaatatggtgaaatcccatctctactaaaaatacaaaaattacctgggcctggtggtgggcacctgtaatcccagctactcaggaggctgagacaggagaatttcttgaacctgggaggcggaagttgcagtgagctgagatcacgccactgcactccagcctgtgcaacagagcgagactccatcttaaaaaaaaaaaaagaagaagaagaagaagaaaagccgagagacccctggaccacctgcctttctgtggtcaccctctgggagtccctgctccggtaccctttgggtgcccaccgtgatcaacagtcaagtcctccccttctgcgacagtggctttttgcagtctcttctctggaatgtttttctgcagatactaatgaatgacccttcaatttcccaggaagggctgcctttttttgaagtggtttaagatctctgctcttgattgcaatcttccaagagctgattttggccacttggctctcatttctgaagtgatgatggggatgagaggggaggaaagcaagtggaagaaaagtgtgtgggctcagctagtctataggaattgtaatcccaggagacaattgagaattctaaaaatagagaaaagaactgttttcttttcagctctgtgaacaagttatccctggtttgtaccccaatatcagccacactcatcttgcacaaatcatgacttctcatgtaaaggtttgctactttttcccagtggtttttcataatttcaaacaaaattatttctagaagactcatcacttatttttaatattaaagtctgtaggatggccgagcgtggtagttcacacctgtaatcccagcactttgggaggccaaggcaggcagatcatttgaagccaggagttcaagaccagcatggccaacatgacaaaacccatctctactaaaaataaaaactaaaaaaatcagccaagcgtggtggcacgcacctataatcccaggtacttgggaggctgaggcacgaaaactgcttgaacctgggaggtggaggttgcagtgagctgagattgtgccactatactccagcctgggcaacagagtgaggctttgtctcaaaaaaaagaaaagaagaagaaaaaacgctatgggaagctggctatggtgtgcacctgtggtccccactactcaggaggctgaggtgggaggattgcttgagcccaggagttccaggctgaagttagccatgactgtgccactgcactccagcctggatgacagaatgagaccctatctctaaaaaaaaaaaaaaaatttaagtctattagaaaatgtgacttgagttggacaatttcatagcacatgtaatttttaagaagtccttgcttctaaatagcatatacctagataaaggcataattgaaaagtggaaaataaaagaatatatcagccaaaaatctcactgtgtatttctagtttgacttaaaaaatgtattatccaacataaaagttaagaacttaaaaattaaaaactttttttttatcaaaacactgccttaagtgagagaaaagtcaagccatagagtgggacaagatatttacaatatacatatccaacaatcaattcatatccagaatctattttttaaagtcttacaaatcaataaggaaaaagcagataagtcaatggaaaaatgagcaaaaagatgcaaatggacaataaacgtaggaagagaagctcaacctcatttgtcattaaagaaattctatttaatcacctgtcaagtcaactcaaaaaaataaaaaagaaaaaaaattataaccaaaaccacattacattattataaacccacaaaaacagctaaaacgaaaaggaaaaacaatgcaagggctagcaagaatttggagcaactgaaagcctcataccctgtgggtggactggcaaattggtacaaccactttggaaaactatagcagtatctatgagagcaaagacatgcattacctctggcccagcaattctgctctcagatatttacccatcagaaacaggtccctatgttcacccaaagacatgggccagaatgttcctagagcattattagtcgtgtcccatgtaaagtgcctggatgttcagcctggacatatagacaaatggagtgtagttcatttatgaatggaaattgataatggaatattcacaaacagaaatccatacagccatgtgaatgaacaagctattgcctcaccaacaatgtggacagttctcacaaacacagcatggacagaaagaagacagacacacaaaaatacacactcaatggtcccatacacataaagttcaaaaatgcgtggcatggtaaagggaggcagagagtggtaatccccagggagctgatgctggggagagtgcctgagggaggcctcctgggcgggtcagaaggctctgcttcttcctctgtgcatggatctatgcacattttaaagataaataaatacaaaaccgtactgcctttaaggcctcttctgctaacctggaaagcccagctgggttagtccggggggggtgcaagaaaagaagccctaacttgcaattcagagccaggaatcacacttatggccaccctgtgtctgaccttaatgagagaggctgtggctttaggtccttagcagctcatctcaggaaagagaacttgttgtcctgtgtcccagctatcttgtcacacctgggctctcacgcagctcctgctccagctcagtttgttccctaggtcagagctttggtgactgtcacccaggcccctgtccaagttctggcctcatggcactaatcccccacgtagccagtggctagctgtgcaacctagagccagttagaaatgtggcttaaggtgatctgaatccttccagaacattagccctgccccctgtggagtccctgagaagagaaatgccccacgagtgacaaagaaggcaaagtatctcctcactgtgtgctggagtcaggccccaggccctggcacagagagctctgatccaccaagccagaagacctagggcccagtggaggccagggcaagtgcctgcctggggtgtgagtgtcttccacaccatgcaggattcccttcaggtcctggggaactgtcaacagagcggaggagctcctattcacccacagacacacacacaccccgtaacacacacacaagtgcacacccatacacatctgcaggcatagatacaggtctgctcatacacacatgcacacacgtacacgaatatcctttacactagacacacatgtgctcacagacacccttgcaatggtgtgcatgcacacacgcatgcacttagagatgcacacacactcacgtagcacttgccagacactattctgagcactttccatatattaactaatttaatccttataaccactccatgaggtccagatatcaatcccactttgcagataagaaaattgaggcccagagaggttaagtcacttgttcagagtaatgcatttgaagcctggcagcttggccttagagtatgtaccttttttttctttttttcttttgagtctcgctctgtcgcccaggctagagtgcagtggcgccatctcagctcattgcaagctccaactcccaggttcagattctcccacctcagactcctgagtagctggaactatgggagcccaccaacacgccctgctaatttttgtatttttagtagaggcaaagtttcaccatgcttgccaggtgaaactcctgacctcaagtgatccacctgcctcggcctcccaaactgctcggattacaggcatgagccactcatacctggctgagtatgtggttttctatgcgaatctccattcacagacaaatgcacaaagacacttgggcctttggacacacacactcccacatgcatgtacacacatgcacagacacatgtgcacacttgcgatcaaccctcccacacatataagcacacacacttctttctgctgcctcccccctcacttcctggcctctctgcctcccactgactcctggtagaaggagtgagagcccctctccccccggccttgccaggcagctgggactcctggctccttgtctgaaacaaacccagggccagcactgtcttcctcgtgccctgcaagtgggagggaagccccagctcatccagctctgttggctactctggttccctcatcaccttgtgagacaaataagacctgttctccgtgttcaatggggaaactgaggcccggaaggaaaaacgagtggcccaaagtcaccctgagtcatggcagggctgggctgtgggtatgcaggcccctggtcccaggccaggctctcctagggctcagacgatacctttgaagagccaagcaggggtgggtgcagcccagagaagtgggcctccctctgactctctggccttaggcactaaagccttccccaggagcccagaaagataagtgcctttctacctggcaaggccccagtgggagtggtggcattctgaaggggctgtcacaactctcagcagtcatgctaaagccccaggtcaggggctgagggatgacttcctgcctgacgtgcccctctgccacatccctccctctctaagagttccccagggtctggccccacgggaagactttctatttcacaccagcctaaccccaagtggcacagcggccggcacagcgactggggccatacatctcagcttccactcctgagttctggacttctcccacaccctttgtgtggctggaggttttatgagaaggccaaaaaagaaaaaagaaaaaaatgaaaaacaaaaaaaaataaattacttgggaatttgtttttaattaagcaataagcctcgatggggcttggctgctgcctcataaaactgctcccggggtgtggggaggcatttggtccagatgagtgcctcaaatcagcccggaatgtgatgagatgattactccccggagttcgtacaagatgagcttctccagtgctgtcttattgctattataaaaagtctgcaggcagtgggggagaaaagctgtggtgctgcttggagaagaagaaaacaccaatgctggctgtcagggccagagctcagccccccacccttccttcaccacatctgctcacatggcggaacccatgggtggcccacaatggaatggaggctgacatccttaacaaaaaatgggtccccgtacacagcgaatgggatgtttcagcagagacacaaacaagaaggatgcgagggacccttacttggagatattttctcctgtcctgccaggagcaagcaaccacgctcactcccagggcagctcaattcatctcactaatgctacaacctacaagcatgcatggctaggaattctgaggcttctctctctctctctctctccccccgtcctgcccccagtcagcttaccaggggaaggaatttttgctttctgggtcatgcgctggcctagccttcactgtgctaggtctggataataaatgaaggaaaaagaaaacccaagacactagagaggtgaaattgacctacgtaataaaacggctgagatggaacaagatgagaaggtaaggaaatggtaagccgccctggctgagcactggggagaatttgggaaactgggagacaagaatggcgaagaaaaggagtctcgaagatccgtcaccatcagctaggaggatggaacaagcagatggagaggaaggagttttaaacatttgctgagccttaagaatatatgttttcttgtggcatttcttcaagaaacagagtacagacttataaatactttcaattattttgtgatgtagatcgatccttctctgactatgatacacacagggactaggctatttgagaccctggttatatttgaattaaattagcaagcatgggccgggcccggtggctcacgcctgtaatcccaaccctttgggaggccgaggcggggggatcacctgaggttgggagtttgagaccagcctgaccaacatggagaaaccccgtctctactaaaaatacaacattagccgggcatggtggcacatgcctgtaatcccaggtactagggagcctgaggcaggagaatcacttgaacccaggaggtggaggttgtggtgagccgagagagatcacaccactgcactccagcctgggcaacaagagcaaaactctgtctcaaaaagaaaaaatctagcaagcataaagacaggagtaggaagatttagggaatgcaggagggtaagggggtaagggatagaaacccctatgaaaagctaagggccgggcgcagtggctcatgtctataatcccagataatctggaagcggaagcggaaggatcacttgaagccaggagttcaagaccagcctgggcaacatagcaagacccctgtctctacaaaaaatatcagttatccaggtgtgatggcacacacctgtggtcccagctacttgggagcctgaggcaggaggattgcttgagttcgaggctgcagtgaactatgattgcgccactgcactccagcctggcaacagagcaagactctgtctctctaaaaaaaaaaaaaaaaaagaatttgagatgatgtccagacaaagacagaacatgaatgaatgaccatataggaacttgccagagagaagcagacgtgccccaggtaaggtgaggcctggttcatgcacatgaacagcccagggcaagtgctctagagtcagacagcccagatgcgagtgtcagctctgccacttgggaaagtccttaaaactcttctcatctgcgaagagatcaaccatgagattggtcatagaactaacttcaccgggatgttgtaaggcttgagtgcactgtctatggaagcacttagcacactgcctagcacatcgcaaatgcccggtaagtgactggtattgctacttgagtggaaaaaacacaaactatttttcctctgctctcccccacgataatcaacacagaagactgaccaaatatgagggggttttccccgcacacccagaaagcaatcggtcctgcagcggacgctaacagggtgtcctttacttcaattctgacaccatctacctggagatcccacaggtgaggggtccatccccaacactgcctccacttctggggccaattgcaaactccagttattcttcctgtgctgctgccctgctgactataaatcggggttcccacaaccccttcctggggttcaattaatttgccagagcagctcacagaacccagggaaacacattcaccagtttatcacacaggctattgtaaaagaataaacagccagatgaaggggtatgtacagccaggctgggaagggtccccaagcacaggagcttctgttcccgtggagttgggagcaccaccctcccagctcatgaatgcacagtattaatgaatatatagaatatcagctttcaattaagctgacttctgcccgtagagctctttaaaaaaaaaaaaacttttcagagctcaggcacagtggctcatgcctgtaatcccagcactttgggaggctgaggcaggtggatcacttgaggtcaggagttccagaccagcctggccaacacgatgaagcctcgtcactactgaaaatacaaaaattagctgggcggggtggtgggcacctgtaatcccagctactcgggaggctgaggcaggagaatagcttgaatccgggaggcggaggttgcggtgagccgaggtggcgcctttgctctccagcctgggccacagacagagcgagagtctgtctcaaaaacaacaacaacaaaacaaacaaacaaaaacgtttcaggtcaggcacggtggctcacttctgtaatcccagtgttagtagtggaagttatccgtgttccccaaaatatgttaccggcggcgaatccgtacgggtctgcagcagcctcaattcttgcctccccagcagaaagaattcgaatgaggggcggaaggcagaagaaaagaccaaagcaagtttcagagcaggagtggaagtttattagagcaggaacaaaagtaaagaaagtacacttggaagaggcccaagcaggcgacttgaaggacaagtgcggggtttcaccttttgacttggggtcttacacgtcggcatacctgtggggtcttacagcacttctcccctgatgttgccggtgggttgggctgtccacaggcaccgtggcctgctagcgcttgggagaggagcatgcgcagtgtgtttactggagttgtacgcatgctcacttgaggcgttctccccataatctagccttcctaggcgaaggccatagaccagttaaacaccaccattttgcctcttaatgtgcgtgattgagcccagctgcccaactcctgagattttttttttttttttttttaatgatgggggatttccaatccgccgtgctgactcttttttctttctttctttcttttttttttaagaacggagtctctcactgtcgcccaggctggagtgcagtggcgtgatctcggctcactgcaacctcgacctcccggcttcaagcgattctcttgcctcagcctcccgagtagctgggactacaggcacatgccagcacgcctggctatttttttgtatttttagtagagatgggtttcaccgtgttagtcaggttggtcttgatatcctgacctcgtgatctgcccacctcccaaggtgctgggattacaggcgtgagccactgcgcccggccccaacttctgggatcttatcgagaagctgctgatgaccagcttcaggttttttctatctatagggagaccgcctttccctggcactggctgcgaccaattattattttagagagacagtgtaacaactgcctgaccatcacctgatgatcgcctgacattcctggtggggtggggtcctcttttgccctgccatccactgtaacacccagcactgtgggaggccaaggtgggaggatcacttgagcccaggagttcaagacgagcctggacaagaaggtgagacctccatctcttaaataaagaaagaaagaaaacttttcaaatttctaattatcagtttttacccaagacaaattcctggctttttcacttttttaccaaaggtaccctcctacttcacaagatccagaaccaccccaaaagacatctcaaagaaaagaaacggctggggacagtggctaatgcctgaaatcccagcactttgggaggccgaggtgggaggactgcttgagcccaggagttcgagaccagcctgagcaatatagggagacctcatctctacaaaaaaaaaaaattaaaattagctgagcgtggtggtgtacacctttggtcccagcgacttgggaggctgaggtgggaggatcacttaagcccaagaggtggaggctgcagtgagccatgagtctgccattacaatccatactgggcaacagagcaagacgctgtcagaaaaggaagaaagagaagcagaagaggaggaggaggaggagaaaagaagaaggaggtgaaggaggaggaaagaagaaaaagaggaagaagaggaagaggaggaagcagaagaagtggaagaagaagatggaggaggagaaagaggaggagaaggagaaggaggggaaagaaaggagagttttggtagctgttagggtctcagcttctcagctaaccatctacacacaaaggctctaaagtcccgtatctccccacagacaggaaatcaaaagctatctgtggaaaaggatcaataacaaatggatacccccaaagtcaaaggtcatacaaatgtcaaactaaaagggactgattccctaactggaaagcaaatccaggccatggcagagggagcatggaattttagctaaactacaaggtggagcagccttcactgtgagtcccacaggggacccaccgtgggtggtttagcagacaaaggattgtaactttgttttaagtgagatttttactctttaattgagctgagagagttgctaaggctagccgtgacactatattcttcctttcatttaatcttcccataaatacaaataaagcaattgtttagaatgagagatctctaatttttttaagatttaggagtttttctcattgaaaggatccatcttttggccactaatgagaatttcctagggtgtacttcttccgatagtgactcaatccaatagcctcttcatggaaaccccagggtgtgattttccaggtttaaaacaagttgtttcctggagaaggcaatatcaaagatttcctccaaaaaaattcactcctaggaatagtctaacatagaaaaagactcttttttttttttttttcctgtgagccagcatcttgttctgtcaccaggctggagtatggtggcatgatcatagctcactgcagcctcaaactccagggcttaagtgatcctcccacctcagccttccaagtagctgaggccacaagtgtgtaccaccatgcctggctaattttttttacattttgtagagtcaggatcttgctatgttgcccaggctggtctcaaactcctagcctcaagtgatcctcccacctctgccatccgaagtgctgggattagaggcatgagccaccatacataaccacaaaagactcttgttgccacagatggttaaggatgatgtttgcacgtaagatgcctccagtaacccacaaatttgtggagagccaccagacacaaactcgttaatctgtgaaaccaggcaggccctcctaggattgggttttcccaggactaacgaggcaacaagggttgagacaacagaagtcacctaggatgagatctctttttttttttttttggtggtggggggtgcaggggggaacagggtctccctctgtcacccaggctggagtgcagtggctcaatctcagctcactgcagcctccacctcccagtttcaagtgattctcatccctcagcctcccatgtagctgggatcacaggtgtgcaataccacgaccagctaatttttgtatttttagtagaaacggggtttcgctatgttggccaggctggtctcgaactcctggcctccagtgatctgcccacctcggcctcccaaagtgctgggattacaggcatgagccaccgtgcccagccaggatgggatctcttaagataaactttcctgagagcttgacacattcagaacaagatatgtgctgcttaaaatcttaacatgtctcggacttccagccattttcagactggccacctgacatgacctattaatatcagtccccagaggcagagacaagagagtgttcccacttggtcataagtcaagctctcaagaacataaaacaagatgagaaggaacctcatctggtttttattttggggaccaacagtgaagtttatattccagcccaaccagaaaaacaaactgaccagtctgcagggctggctggaacaaccagcttgagagcgttctgcattgtgtcccccacattggcagagcgacatttgaaccagagtgactccatcttgaataggctctctaggtaaaataaggctgagacctactgggctgcattcccaggaggttaaggcattcataatcacaggatgagacaggaggtcggcaaaagatacaggtcacaaagtacttgctgataaaacagcatgcaggccgggcgcagtggctcacacctataatcccagcactttgggaggccaaggcaggcggatcacctgaggtcaggagttcgagaccagcctgatcaacatggtaaaaccccgtctctactataaaatacaaaattcagccgggcgtagtggcagccacctgtaatcccagctactcgggaggcagaggtaggaggatcgcttgaacccgggaggcagaagttgcagtgagccgagatcgagccattgcattccagcctgggccgcagagcaagactccgtctcaaaaacaaaacaaaacaaaacaccagcatgcagtaaagaagccggccaaatcccacaaaaccaagatggcaatgaaggtggcctctggtcttcctcactgctcattatacgctaggtataatgcattagcatgctaaaagacactcccaccagcaccatgatggtttacagatgccatggcaacgtcaggaagttaccctatatggtctaaaaagggaaggtgccctcagctccgggaattacccaggcctttcctagaaaactcatgaataacccaccccttgtttagcatataatcaagaaataacataaaaataggcaaccagcagccctccgtactgccctgcctacggagtaacaattctttattcctttactttcttttcctttctttctttttttttttttttgagacagagtttcgttcttgtcacccaggatggagtgcactggcgtgctctcagctcactgcaacctccacctcccaggtttgagcgattctcctgcctcagcctcctgagtagctaggattacaggcacctgccaccatgcccggctaatttttgtatttttagtagagatggggtcaccatgttggccaaggtgatcttgaactcctggcctcaagtaatccacccgcctcccaaagtgctgggattacaggcatgagccaccacgcccggccttattcctttactttcttaattactttcactttactctatggattcatcttgaattctttcttgcgcgagatccaagaaccctctcttggggtctggatcgggaccgctttccggtaacactatgggaccccttgttatgacagagcaacaaaaaaagacaaaaacaaaggaaaggactatttctgggaggaaaaaagatcaaacaatagtaatattcctaccaaaaagtacaccagagttgccacacccaagactagccacacaaatccttttctcccatcaatcaaaattttgcagagagaaaaacgacagtcatttttactatttgcttgactggattttacagagagaggctgggagcccggctggtaagaaattcttacccttctgccagtttgtcaggtcctgggtttccttcactgcagctcccaggagagcagaatggtgtcagtctcctgctcacagtgccaaaactgtaggggccgagggacaatttctccttctccctctgaaggtttgctggaaaatcaactgaacaaggcagattaattagagaaaaggcatgcacatgtattaacatgcacgcggaggagaaccacagagtgattatcctacccaccgtgctgtacagaagcttatatgccatgttggggttacagaaaaaacaggcagagggggcactcagagcacgtccaaaaatggcttatggcagcaaatcaggttatagcggcaaatcaggttatagcggcaaggagggattggaggggaagaagagaagtcctggctagcataggtgggcttgttatgcagatgaagcctcccaggtagcagtcctcagaatagatggtgtttcctaaagacttttaaaggcgtcagattctttcctagatctggacagggaagagactcagagaaaacctggctgcattagtgcagatgttttttctatagatgcaaatctcccacataaaagacagctttgccacttctgttcacaggccctctgaacagtcatctcagaatatgtcaaagaagtgtattttggggtgaaatattttgatttccttcacccctaaagagaaattcaacccaaatcagccaaaaactgtgttgagccactactgtgggtgtgcacaacgggaacggagcccaatttcctgtccccgggcctgatagccagggagccaaaaccacagagagaaattgtatcgtgccaagagatagagcaggaacacgaaagagcatgggcacttcggaagtgtgtgaaaagagtgagaagtgtatccagctcgtgcagcctaggagatgcagcttgccaagtggagtgaatgctgcctttcagtgctctcacctctgctgggcatgtttgtgcagtggccaacttgctcaaccgtatgcaatgaccttgaaaagaagtctcctctctgagcttagaactgagtaatgtctcaaactgaaagagaataaatacatgctggatttgagtttgatgagacgctgcccattgagaaaatctgttctatgccttatgggattaattcaggaataagtaaattgagtaaagagatttgaactccagatattcaaagagctcttgacaaggtgaaaccctgcctctgattgagactgactagagccggggtcctgtgtgaccttgatgctgatgtaggggatgtgggataggacagggaaatcagggcaatcttaataccagagaaagaaaacaagggattcacttttttttttttttttgagacggagtttcgctcttgttgcccagtctggagtgcaatggtaggatctcggctcactgcaacctcttcctcctgggttcaagcaattctcctgcctcagcctcctgagtagctgggattacaggcatagtgccaccacacctggctaatttttttttgtatttttagtagagatggggtttcaccatgttggtcaggttggtctcgaactcctgacctcaggtgatccacccacctcagcctcccaaagtgctggtattacaggtgtgagccactgtgcccagcctgggattctttttttttttttttttcttttttgagatggagttttgctcttgttgcccaggctggagtgcagtggcgcaatctcggctcactgtaacctccacctcctgggttcaactgattctcttgcctcagcctctctagtagctaggattacaggcgcccaccaccacgcccagctaattttttgtatttttagtagagaaggggtttcactatgttggccaggctggtcttgaactcctgacctcaggtgatctgcccaccttggcctcccaaagtgctgggattacaggcatgagccactgcgcccggcaggcattcactttcttaaacaggatatagatattccaaaatcacaccctggtcacaacacaggaaacagtaataagagtaactgatccttacgcatggttgctatgtgcgtatgctgccttagacagttcccaggtgttaattcatccacttggagctctgcccatctctaccttgaagaagctgctgttcagtctttcacttcatgcccagtcccctgggcctccagatgctcagaaaccctcagtcctgtctgaggcagactccaggcttttaaaaaccctagatggctaaaatgaaatagctaaaagagatcccagtgcctgcctccgggacaagaagaaaggagaggtgaaggcagagaattcacaacaagcctttggggaccgatgtttcatttggtttttttaactttcaatttaatttgatggaacatctgaggattccttgttgctgttgttttttctgttgtttgtttagaacaagttttttattatttatttttatttatttattttttgagaccaagtcttgctctgttgcccaggctggaggtgagaggtgggggccgtgttaagaactaggctcaggcaggtgcagtggctcatgcctgcagccccaacacttttggatgacgaggtgggaggatcacttgagcccaggagttcgagacaagcctgggcaagatagtgagatcctgtctctacagaaataaaaataaaaataaaaaaattagctgggcatggtggcacacacgtgtagtcccagttacttgggaggccaaggtgggaggatcgcttgagcccaggagtttgagaccaccctgggtaacataatgagacctcgtctctacaaaaaatttaaaaattagctaggtatggtatgtgcctgtagtaccagctactcgggagtttgagtcaggaagattccttgagcccaggactcaaccacaactgtaccacagcactccagctggggcaacagagcaagaccccatctctttttaaaaagtttaaaaaaggaaaaaagaaaagaggaccaagctcatttctggaatcttgtttctcttaattctagttgccccttttgaaagatttttagcaagatagtttgcccttgctttgtggggcaatttctatgcctgggttgtttcttgttttgtgtattttttctagtttcgctctatttcttttgatataaaaggtttgggagttttattgtttgggtgggttatgtttttttatttttgtctttgattttgtgatttacttgtttttacttattcagggtcctctttgggaaggtttaggagagggaggctccgaggttgagcttcctcctctgccttcttagccaggaaattccctcttgtgacttcagaaaagagaagggaagttctgacccccagcatctcaggaaagctgaagaatcccttaggagggcattagaggaacttgcccaaaaacatattaggagagagagaggttcaggcaatgacagattgtgcttccttttttcttttttttttttttagatggagtctcgctctgtcgccaggctggagtgcagtgacactatctcagctcactgcaacctctgccttctgggttcaagcgattctcctgcctcagcctcccaagtaactgggactacaggcacgcaccaccatgcccaattaatttttgtatttttagtagagacggggtttcactatgttggccaggctggttgaactcctgacctcgtgatccgcccacctcggcctcccaaaatgctgggattacatgcatgagccaccgcgccgggccttgtgcttgctttttttttccccctcttgtaacaataggtaacttggaagatttccagtgtgaccttcattcgtgcctaggtggccaccaaaccccaactccaaggccttgccagttttttaaaattctaacacattgaacgaaataatggcattcccagcaacctggatggaattggagaccattattcttttttttttgagacggagtctcgttctgtatccaggctggagtgcagtggcgcaatcttggctcactgcaacctccgcctccggggctcaagcaattctcctgccttagcctaccgagtagctgggattacaggtgtgcgccaccacgcccagctaatttttgtatttttagcagagacgggatttcatcatgttggcctcgatctcttgacctcgtgatccacccacctcagccttccaaagtgctgggattacaggcgtcagccactgctcccagctattattcaaagtgatctaactcaagaatggaaaagcaaacatcttatgttctcattcataagtgggatcaaagctatgagagcacaaaggcataagaataattcagtggagtttggggactcatgggaaagagtgggatggggtgagggataaaagactacacattgggtacagtgtagatggcttgggtgaaaggtgaaccaaaatctcagaaatcaccaccaaagaacttatccatgtagccaaacaccacccgttccccaaaaacgattgaaataaaaaaaaaaccttaaatactaaaaataaaatataaaattctaacacattaaacttttgaaacatatgtgcacacacacacacacacacacacaaatcctaattaatcagcaaccatgtaaagaacaaatgtgggaaatgctgtatatgctatgagaatttcaattacaaatgacaacgttatacattttactaatatttgcttttgctttaaaaattttaaaatttacattaaatgtaattctttagtgtacaattctatttgttttggcaaatacataaagtagtgtaactactctgtcaacaaagagtcaaacttggccaggtgcggtggctcacgcctctatcagcacttagggaggccaatgcaggcgattacttgaggacaggagtttgagaccagcctggccaacatgatgaaaccccatgtctactaaaaatataaaatattagctgggtgtgttggcgtgtgcctgtaatcccagctactaaggaggctgaggcaggagaatcactggagcctgggaggcagaggttgcagtgagctgagatcacaccactgtaccgcaggcctgtgtgacagagcaagactccatctcaaaggagtttaaaaaaagaatcagactctgtaaaatattttaacagatttattctgagccaaatatgagtggccagtggcctgtgacacagccctcaggaggtcttgagaacatgtgtccagggtgttcagggcccagcctagttttgtacatttttaggagacaggaaacatcatgcaagatatacattggttcagtccagaaaagtgggacaactgaaagtggggggactcgagcttataggtagatttttaaattgtctgatttgcaatgggtttaaagagttattatcaatagaaaggaatgtctgggttacaaaaaggggttgtagagatcaaattttatcacgcagaggaagcctccaggtagcaggcttcagagaaaagagattgtaaatgtttcttagcacacttaaggtctgtgttgatgttaagtaggtacaaaagtaatttgccatgacctttaatgacaaaaaccacaattacttttgtagcaacctaataaatgctggtcagcttttcctgaattccaagagggaggagggtataatgaggcacgtcctctcatcatggcctgaacccgtttttcaggttaattttggagtggcttggctgagaggaggggtccatttagactgttagggggcctttgaattttatttttggttaacaactcccacaatcaaaatacaaaagagttttccatcatcccaaactcccacccgctccccccccgcacccccccaccgccccatgctacccgttgtggctaccccacccccaagcagaagctactgctgatcagtcatccatcctgacagttctgccttttgagagtgccatagaaatgataacgtagaatatgtagcccttggagtctggcagtttttctcttagcataatgtgtttgagattcattcttattgctgggttagtagtttgtttcttattatggttgaggtcctcttcatttcattgcttggataccatattttattcatccattccacacttgacggctatttgggtcatttccaatttttgcggggtttttttgtttgttttttgttctttttgcccaggctggagtgcagtgacattatcttggctcatggcaacctctgcctcctaggttcaaatgattctcctgcctcagcctccctagtagctgggattacaggcgtgtgccaccatgcttgcctaacttttatatttttagtagagacggggtttcaccacattggccaggctggttggtctcgaaccctgacctcaggtgatccacaccccctcagcctcccaaagtgctgggatgacaggcatgagccaccgtgtctggcctaatttttgttttttagccataaagctattaaaagcattggttaacaggattttttgtgtgaacggaagtttttatttatcttgagtaaccatctaggtgtgagattgctgtatcatctggggagagtaggtttaactttgtaagaaactggcaaactgtctctgaagtggttgtgtcctattgtgttcctagtagcaatgtatgaaagatacagttgtcttgcatactgtccagaacttggtattcgcattatgggtttggtttggtttttatagccattcagatagatatgtagtataatagtatctcattgtggttttaatttgcattttcctaatgtctaatgattttgagcatttttcatgcctttatttgtcattcatatatcttctttgctaaagtgtctgttgaaatatttgctcattttgtgctgtttttgagacagggtctcactctgttgcccaggctgaagtccagtggtgcgatcgtggctcactgcaacctctgcctcccaggctcaagttgttctcccacctcagcctcccgagtagctaggagtaaagatgtgtgccaccatgcccagctaatttttttgtattttttgtagaaatagggtttcaccatgttgcttaggctagattttgtctgtttttaaattaagctgttttttctttttgttgggttcttcatatattctgaatacaagccctttgtcagatatatgatttgcagatatttacccctagtgtgtggcttttctttattttaacagtgtctttcacagagcaaagtttaattttgatgaggcataatttatcttcttttttctttatggattatgtttttggtgtctaagaacactttgcctaacccaaggtcatgaagattttctccaatgttttcttctaaagaatttatagtttgatgtttcacactcaggtcaaaaattcattttgcgtttgttattgtttaagtgtcttagttcatttgaccacaaacggggtaatttagaaataatggaagtatatttcacatcgttctcaaggctgtgaactccaagatgcaggtacaagcatattgagtttccagtgaagccccagtctgtgcttccaagatggtgcctcaaacactgtgttctcacatagcagagagtggaagggtaaagggtctaagctagttccttccagcccttttattaggcactaatacattactgagggtggaggctgcgtgacttaatcacttcacaagagatcccacctcttagttccaccacagtggggattgtctcaacacatgaattttggggaacatccagaacatagcaataaggcatgagatgtaggtcaaggtacatttatttgcatatggatgtctaattattccaggaccatttgatgaaagcactgttcttcctccattaattctgtttgcacctttgttaaaaatcaattgatcatattcatgtgggtctattgttggactctatattctgttccattgatcaatttgtatatccttcgagaaatatcacattgtctcaataactacagctttatagtgagaagtagtgggtgttgcacttttgctctttttttctgaaatgttttggtgattctacttcctttgccttttcccacaaagggtgtgtgtgtgtttgtgtgtgtgtgtgtgtttgagacagggtctcactacatcacccaggctgctagaatacagtggcatcatctcggctcattggactctgcctcccaggttcaagcaactataggcatgcaccaccatgccaggctaatttttgtaatttccgtagaggcagaggtctccctatagtgccaaaactggtcttgaactcctgggctcatgcaatttgcctgcctcggccacccaaaatgttgggttacagatgtgagccaccgcacctggcctcccataaattttagaatcactttgtcaatatctgaaaaaaaaaaaaaaaacctgctacacttttgatcgggattgtgttgaatgtatatacaccaagttagggagaagtgaaattttaacaatatcaagttttccaatccacgtatgtattatatgtctacatttatttaagttttctttgatttctttatttttcaaaatttttttgtcttctccgggtcagagttgaattatttgatttctttagttcatgttttgtagttttcagcatacaaatcctgcatgtgttttgttagacttatagcaaagcattccatcttttggtgctgttgtagatggtactgtttttaaatttgttattctcaattttttattgctacatatagaaatataattgggttttgcatattgaccttgttcctgtgtacttgctaagctcacttataagttctgggaagtacttgtaaattccttgagattttctatgcagaccagcaaatcatatgacaatagagaaaaatttatttctttttgacttatatgccttttatttctttttcttgctttattgcactggctaggactttaggaacaatgtttagcctattgatatggtgaattaccttaattgattatttaaaatgttgaatcaaccttgaattcctagtataaacccaacttggtcaccttgtgttatctcttaaaaatattgctagatttaatatgctaatattttgttgaggatttttgcatctaagtttatgaaggatgttggtctgcaattttcttttcttatactgtcttgttctggctttggcattaaggtaatgctggtctcataaaattttccggaagaaattttgtagcattgttattaatttcttcctttaatgtttgataacattcaccagtgagatcatccggcatggagctctttgttgttgttgttgttgttgtatggcttttccatacaaaataaacttctttaatagctataatgtttttcaagttatctcttttttcttaagaaagtcttaatggtttatgtttttcaaggaattggttcatttcatctaagttgtcaaattcatggacatagatttattcatactatttattttttaacgtctatagggtctatagtaatattgcctctcattcctgatattagtaatttgtgttttctctcttttttcttcatcagtccaactagaagtatatcaattttattaatcttttcaaaaatcctgatttgggatttctttgctgttttttagttttcctattttatttatgtctactccaatttttattatttcctttcttctaaatactttggacttagtttgttcttttttatcccatttttttaaggtggaaactcagataattgatttgaggccttttttccattcattgtggaagcgtttaccttcacctcctggagaatggtataatcatggggacatttgctcccaagacagaagtttgctctctttatccattttctcagaataaaagacctccccgcttctgtcttccaaggattataagcaaggaggttttatggggcgtttatgaagatgctgctggagtttgtcttaagaaacaggaataaaatgcatcatgaaaaagatggtgatttttatgtctcaagaaaacatccctaagatgtgaaaagaagacgtatgaaagctctcccatcacttcagctggagaggagacagtgagggttggggcaacagaaagcaaagtggggaggaacaaaggtgggggatctagagacttaaaagctgcctagagattggagtcttgagtgataggagaagtacccactggtgtctgtgtcttagtcaaggtcttcctagaagcagacaccaagacagatggacttggggacatcagtgaaggataaagaagaggtagtcagaaaagatggagagacccttcagatgactttgccagcctgacaccaggagaaaggaagaagagtctcaaactgcagtacagttccaagaaagtgtcagtcaggccagtggggaatccctgagtcaaggtaacccaaggtcccacatctcacaaagatggaccagtctcagcacccatcatgctcagacattgactggcagcagcctggaggaagttgggcgctggcactaacacagtggtaggtccccaaagagagcatgtggggctatcagtcaaccacactctcacagcagaagggtgagccatgcattttcatggctgccaccacagtatggggacagggaacagtgtgggggtaaaaagcctaataatgcatgctctcctttgtcctgagctgctcaacccaaccccaactccaggggcactctggaaaaggcacctgggcccctgcttcgggaaaaagaggaaacatcatgagagggcacctcctgcaggaactgcaaatgcaaggcaaacttgtcagcctccagaggcctcagggagggcagccaaggtgggtgacagcagggagccgggggctgtgcaggagcaggatgggcacatcctctaagagcactcaagctcagatttttgggtaggggggcttttatcctattttattttattgatgtataatatacatacaataaagtgcacgaatcttatgtgtatagtttgataatgttttttttttgagatggagtcttactctgtcacccaggctggagtacaatggcatggtctcagctcactgcaacctctgcctcccgggttcaagcggttctcccacctcagcctcccgagtagctgggactacaggcatgtgccaccacaccccgctaatttttgtatttttagtagagacgggtttcactatgttggccaggctgatctcaaactcctgacctcgtgatccacccacctcagcctcccaaagtgctgggattacaagcgtaagccaccgtgcccggccttagtttgataatttttttacacatattgtcagcattcatcattttagcaattctggtgaatgtcaagtttagatttattgattgatttatttatttttgagacagtgttttgctcttgttgcccaagctggagtgcaatggtgcgatctcggctcactgcaacctccgcctcctgggttcaagtgattctcctgtctcagcctcccaagtagctgggattacaggtgcacaccaccacacccagctatttttttgtattttgaatagaaacagggtttcaccattttagccaggctggtcttgaactcctgacctcaggtgatccacccacctcggcctcccaaagtgctgggattacagacgtgagccactgtgcccggcccaagtttagatttttaaaatccagcatgctagccaagcaaaacggaactgtgggacctgcaggcagccagtgtgaaaacctcacacctaggagtttttcattgcctgtacaggtgcccacagcacacacacatctggaagtcaggcctctcctccacttctctgaatactcaggtgcagtccctccagagggcagggctcattgcccttgcagtggatcccatctctccagcccatgtctacacagttttaatattcccaaattatcaatcacacaaggtgatggtatgtattaggttattgttatcatcatcatcatcaccaccaccactgttaggatgcacaaatgcaaaaggtacaaaattcaaaagacagaacacgatgtatgagttatcggttgctgcctaacaaattacctcaaaatgtagtgtcttgaagcctgggcaacatagtaagacgctaagacactgtctctacaaaaagtaaaaccagccaggtgtgggggcatgcacctgtcatcccagctactcaggaggctgaggtgggaggatcacttgagcccaagagtttgaggctgcacatgagccatgattgcaccactacagtccatcctgggtgacagagcaataccctgtctttaaaaagaaaaaaaaactagttggtggcttgaaacaatacatacttatacggtatcacagggcttctgcagggcaggagccagggaatggcccagctggatggctctgcctctaggtctcccatgaggttgcagctaagatgctggtctaagccatgatcacctcaaggctttctggggctgaacagtcttccaagagtcttcctcacccctagcaaggggttggtcgctgttggctggaggcctcagtgtctcccatgggcttctccggagggctgcatggacctcttcatgactcagcagccagcttcccctggagtgagtgatcctaggaagcaaggcagaggccacaatgttctttatgacctagacctggaagccacgctctgtcatttccacagtatcctgttggttacagaggtaaatcctattccctgtggaagagaactataccagggcgtgaataccacaagggtgccaggcatggtggctcacacatgcaatcccagcactttgggaggccgaggcgggcagatagcttgagcccaagagttccagaccagcctggacaacatggtgaaactctgaatctactaaaatagaaaaattagccaggtgtggtggtgtgcacctgtaatcccagctacttggggggctgaggtgggaggattgcttgggcccaggaggtagaggttgcagtgagccatgatcgtgccactgcactccaaccaaggcaacagagcaagactcagtctcaaaaaacaaaaacaaaaacaaaaacaaaaccacacacacacacacacacacacacacacacataacaaaacaacagcaacaaaacaaacaaaaataccacaagtgtatacagtaaatgggaatctccctcccacccattttcccttccagaggcaaacccatgaccagtttattgtgaattctgccagcaatacacacacacacacacacacacactctcacacactcacactatgcgtccacttgtataccttacttttttttactcagtatatcctagaaatccttgcatttcaggacatgaagacctgccttatttcctgaaactgtgggaagccattccattgtatgaatgactcgtaatttctttggccggcccctgtcagtggatattagggctgctccctgcatttccctactgtaagcaatgccacaataaatgaatgagtgtttatatccttttgcacaaggacaggagtatttaaggataaattctggaagtggaccagctggagaaaaaagagcctgtgctttttttttttctttttgacagagtcttactctgtcacccagggtggagtgcagtggcatgatcttggctcaccgcaacctccatctcctgagttcaagcaattcttctgcctcggcctcccaagtagctgggactacaggcacccgccaccatgcccacctaatttttttttctttttaagacgtagtcttgctctgttgcccaggctggagtgcagtggtgcgatctcagctcactgcaacctccgcctcctggggtcaagcaattcccctgccttagcctcccaagcaactgggattacaggcatgcaccatcacgcctggctaatttttgtattcttagtagagacagggtttcaccatgttggccaggctggtctcgaactcttgacctcatgatctgcccgcctcggtctcccaaagtgctgggattacaggcatgagccaccgcacccggctcttgcccagctaatttttgtatttttagtagacgggatttcgcatgttggccaggctggtctcgaactcctgacctcaggtgacccgcctgcctcagccttctgaagtgctggaattacaggtgtgagccactgtgtccggccaagtctgtacattttaaaatttgatcgatgttgccacattgccccccatgaaggttggttgtaaaaatttatgctctcaccagcaagaaaatggatttatgaaggcttgggtggtaatggccaaaatgtagggcattccctgggcagttcagtaagtaattaaaaatggaatatcacctgtccgggtgcagtggctcatgtctgtaatcccagcactttgggaggccaaggcaggaggatcacttgagaccaggagtttgagaccagcctaggcaacatagcaagacctgtatctcaataaaaaatttaaaaattagctgggagtagtggcgtgcacctgaagtcccaactactcaagaggctgaggcaggaggattacttgagcccagaagttcaagactgcagtgagctatgattgcaccactgtaagccagcctgagcaaccaagcgagtccctgtctcaataaaataaattttaaaaagaataaaaagtaacatggaatatcacccatccctgttctttgaagcctttcccagccccattccacaaccagagagcctccctggccctctctcacgccatgtgctggactttttctctctctggcttgcttgttcctggcccctggaatttctgttcttgccttaaatgcagcaagtgaggaggtatttgccagccagaccccaaaggctgacactgaaatgccaaatggttctccaagatgtgtcatccaaccaagacagcttctcctgcacagacccctgccctctactcggggtgggcagccttctctcctcatggataaatatgacgtgttcatgggtttgccccaatggactgtgagctccccaagggtagaggcagtgccacattcatccctggatccactgcctgggtagtggcacaaagagggatccagtaattgctgaatgaatgaatgaatgacccagacagaactttgtcaaaccagtgctgtcaaaagcctcttggatgtactccattgacattaggtgggtctaatactctcaggttatattggcctgcaacatttatttcacatctcgaaggcatttttcaaaaagcattgcttctgttttatttatttatttttagagacaaggtcttgctctgttgcccaggctggaatgcagtggtgtgatcttggctcactgtagcctcaaactcccaggctcaagcgatcctccctcctcagcctcctgagtagctgggactacaaacacgcaccaccatgcccagctaatttttgatatttttgtagagatggggtttcactatgttgcccaagctggtctcgaacccctgggctgaagtgatccacccgcctcaacctcccatagtgctgggattccaggtgtgagccaccacgccctgcctgcttctgttttcttttatttctcctttccccctttggcctggttggagcctcaaggggaaaatccatgctgggaaacaaaaacaataatgcccgtgaacatgaagtggatgtgcagacagctggaatgataaatgcagggcatacacacacacacacacacacacgcacatacacacacacagagagagagagaaaagaataaacaggcagacgggcagggcaagtgggtgcgggggcgtcagtgtcatctcatggttccgtagagtcgagattatctcagcttcaaatccaaggcccctgcagcaagcccgccctcaagattctcttttgaagtcacagtttgccaaacatctctgggtttcctcctttaaaactaatcttcttaaccatttcagtaaaaatcttttcaaaatgccccacattttatggctttgagactcagtgtctttagtatgttacggtatctataaagaaagcagcatttaggccaagtgcggtggctcacacctgtagtcccagcactttgggagactgagacaggaggatcacttgaacccaggtgttcgagaccagcctggccaacataatgagacctggtctctacaaaagattttttaaattagctaggtgtgatgggttgtgcctttagttccagcactttaggaggtaaagctgggaggatcacaaggtcaggtgttcaagaccagcctgagcaacatagagagaccccccccgcctcccctacatctctacccaaaatttaaaaagttagctgggcgaagttgcatgggcgcatagtcccagttactcaggaggctgaggcaagaggatcgcttgagcccaggaggtagaagctgcagtgagccatgattgtgccactgcactccagcctgagtgacagagcaagacctcatctctaataaataaataaattgaaataaaataaaaataatgttttaaaaagaacacagcatgtagtagtttgggaatcagacaaatttagggtcagtttgaggatctacccaagctaaacagtaggacctctgtttcctttgtttttctttaatttgttttcccaattttttgttttggaaactttcaaatcaatagaatagttataagaaaagttcaacgaatagccagagatcagggactggtaaacttcagcccacatcctggttttgtatgagctaagaatggtttttaattttttcaaatggttggaaaaaaatttttaaagaatttttcataacacacgaaaattacatgaaattcaaatatcagtgtccatgacgttaactctcttgtttaagtattgtttgtggctgcttttgctttgcaacagtgaagttcaatagttgccgtagagatcctggctctcaaagcccaaagtacttaacatttggccctttacagaaaaagattggagactcctgaccccaatttaccaattgctaatattctgcctcctttgttttctctctctcttgctggaatgtttgtgttcatccttaaatacttcagtgcctatttcagtttcttatactgaaagctgggaatgacagctttagtgtgggaagagataagataacataaaatgtttagcacacagtgcttggcctgtagacagaacttaataaacgatccaaaaaaaattcctggcattgagcacagaggtggttgccagaatccctaacctgaaaatgccgagccccactgcttttctgaaacccgggttcccgcagtctggaagccagcttttcctccaaaagggcttctttcctgagaagtagcaaacgcctcggagaaacctcattctttccacagctatgtggcttggctgactcaacttctgcctgcccctgagtcacgagtttttcctctcttatttggaggagcgaggccctccaccctccacccagctgtccccacgcacagccagccccgctgggaagtggatggacagctgggagaccagtgcgtgctgcctccagggcgtttcttggagcgccattcagatccatagttggaaggaaggacagaagaggagactgaggtccaagtgggccctggaccaccagcaggacaaggctaggaggaacatcctccctctagtttcccagtcatgaaaaggcttccttctcccgaggcctcctctgtacggacaaggtgttagatgccaggacactgttataaagagacagccctgccttcccaggggactggctcccttccaagtctcacagccacctccaccccagccagggcctaccctccatgagaagcagctccttgccagggaggtggcggagctggcactgagcagtcatggatcgcagccttgaaggctcagcttgaagtccccctccacccgctggtgacaagcagtgtgtacacaggagatggtgtttcccagcatcccaatggccccactgaccctcctggttattactctgcctgtgggatctcagaccttgtgttttctgctctctgtggtatagaggcctggctgccccttcaggacttgtaaacccaaacgtatattcatctggaggtgcaaaagggggtaaagtgccccaagggggaaaccagagggagtgtggggaccatagtggaggggagaacacaaggcccctctaaagaggacccgcattctcaaatcttctgatttaagagaagctgaagatcctgatttttatgtgaactctccccatatgaaatgttcacagcaatgcattttaaaaatgtttaaacactttgaaagcaaacagacattattcgggtcttgtggggttcagggttacttaccaggcggtgacttctgttgaatgctcataaaagctgtccttgctgatgagggcaacggtagtgggtgggcgccatgaagtggtagtggggagggggctccccaaggccacagctggtggccctctcacttgcctgtcccctctccctccccctccgtcaccccctttcccttcccttctcagctgggagaggaccgtctccagcactgggcccacctcacagcctcgcccatagccccctgccaagagagcaggcacctcttctagctccagccccacagccctacagcccatcagccctccccccgctgctcccctctcacctggtcctggcccagcaggcctgccccggcctgagccacccctctcagggtgcccaggtggagttctatttggcaagacaacctgcatctatgtgacaggtagggactgcgttcctcctatgcgctgcccgttctcagcactcggtatgcaggggtgaaccagaagaaagtcctgtctgaacacgagaagaaattactgtctagcccgtggggctcacagcctgggtgggaggcaagccaccagcatgacttgtttatgagcattccacagaagccacagcctggtaggcagccctgaatcccacgagcggcctcaggagaggactctgggttgggagatgctttgcaaaattacaaacacgggtgactgtggagggagatggggtggagacagggaaccgctttgggtggccagggcagcctccctgaggaggtgacagtttgaggtctgatggaggtagaagcaaaggcctgaggctttaaggaacaggaagaagcccatttgagaggacctgtggggaggaggccagggagggccaggaaggcctccgggcactgaggcctgggaatttccttctgagccgcacaggaggctcaggtgcggttgagtcaggggtgacataacttgctgctagtgttggacctgggtgacgggcaccagggtcccctggactattctctttccttcagtttgaaattttccactataaaaagcttaaaataggccaggtgcggtggctcactactgaaatcccagcactttaggaggtcaaggcgagaggatggcttgagctaaggggttcgagaccagcctgggcaacatagtgagacctccgtctgtacaaaaatacaaaaactagccggtcctggtgggctaattctcctggggtcaggatgatttctgtgcaggctgcagtgagccgtgaccgcgccattgcactccagcctgggcgacagagggagacaccgtctcaaaaaaaaaaaaaggttataaagtgctgctgcattttcatattacgattattgaccgctgagggtgactgtgctgtgaggcccgccggaggcaccagaaggcacaagcctcccactgcccctttccccgccaagtcccgcaggtctcgcagtcgcgggcgcccccaccccacccctgcccaaggccagggtcgcagtcccaccgggtgacggcagtcgcgctccgcgtggggcagcggcgagcggaaagggaagccgggcggggccagggggtcaaacacgggcgacagtcccgcccagccccggacctgcagcgcgcacaagctcgggcgccctccgagcgccgcgcccaagccccgcccctcccgcttcccgggctccgattggccgagccaccgcgggggcgtgtccggcggagctggccgggacccgggcggagcgggcggggacccgggctactgcggtgtggactcgagggctgggcgcggggccggcgcagaaggtgagtccccccaccgtcccccggccgggctgcgggtcgcggggcaggcgcatgaggcgagtctcccatcaccacccccggacaagcgagctctctcccgccgcgcggtcttggcggctcctgggccggcggggcgcagtgccgctgactccagcccaagaagaggcctgggaagggcgctcctgggcggcttgcggggtgaacctgcagggagcctggggagagcggtcaggggtcagagcgtccgaggcggaatccccggggaaacgcgcagatgtaagctggtggaggtaagggggtcgcgggccacccgggactgcaggggtctcagcgcacccggtcgctggtggtgtttccgggatcctggcctcgtgtggccgccgggacctctcttctcagccccagtctgcagtctggaggcctggatgggaccactgtccccctgggcaggggcgcggcggggggcgctggggtcccagttcctctggagcagttgagtttgtgattcttggtgggagctgccaagggaaacagggtcgggcactgctcccatctcagagaggaaactattgagcaggcccgcagagagaggcggcctggaatctccctcctttctcgtttccccaacacctggcgggccgtgtagggcagaggtgtggtcagcctctttgcaggtgggaaagcagagaggttccgagccacgctgaaacttgatctctgcagcccaaggggagcactcctttggaatttgaacacctctggtatctcctggccagagagggtcagaggccaaggaggtggggaggtagtcccctaatgcgctgggatcgtccctctgcacagcgtcgttcccactggagtctgttgtgagctgagatgactctctgacttcggcctgcgtccctgcacacgtcagccctccgggctgccaaaacacaggccaggcagccctgggtgaactaggggacctgcccaacccagcccaccccgaggaaggaagggggattggccagtgtggcctggagggtgggacagcccagccaagctgacggacctgctcgggatggggtgggcatcaggcatttggagcgcaggcaacacccgctggactctgacttctggagttctgatttggtctctggttgagtgcagctttccacagctcatggttattttggagccgagcttcctgatcactcagcagggaccttgggcagtgactttgatgtggtggaagtaccttccccaagggggcttttgtgaggattaagtgaaataatgaacgtaatatgcttaactttgtgcctggtgagctctaagtgctcagtcggcggcacttccagttttgttttgctttgtttttcattaccggtctcttcccggaggagggccttccaggaatcacagggctggacagagcccaggggcggcccctctggagggagaggaggcttggcgcctgatgctgcagtctcaatgcacatggagaaaacctcacatcctcacgctggcctgggagcctgcaggatgtctcctgccggcactgcaacctcatctgtcctccttgccccatcgctccttcctccgcagcctgacttcacccattccaccttgagctgctccccaggaccggagctctgcccctagatctttgcacagctgacttcaggctggagtgagttcacttcctcccaaggccttccttcctcgacctccaccgtcctcccaggccctgccctgctgggcgcaccagtctttttcttcacagtgtttagcactggctctcagaaaagaccctgtgaatgtacttctagtctcactggcaagaagtgtgcattcctgaagggcctggtctccagctcccggctgtaacctcgcacagtgtctggcacacagtgggactcataaatatttggaaaatgaaatcaggcaggcatggaagcagggtgggtctgcgtgcggcccaggtccctgcagggaaggaggagccccgatctggaagtcaagggaaagtccaaagggctgagctgcccccagaactctgattcccttggtgaccctggccctgcacgtccctgagcaggttctccacctgtaacccgaggcagagcagttacagcccccaccccatcccccaccgctgcccagctcctactttccagggctaccatcttggggccccacgcatctctcatttatccaaaatgctgtgtccggagtaggagagaggacaggacgactcccgtcaggacagtaccttgtgtggcctgttcagcgtgccctgcagtgtgtgcattatacattttacaatgtggcatggtgtagatcaggggttggctaaccttttctctcaagagctggtagcaaatagtttaggttttgccagccatacagcctctgtcccacatggctgtgtttgaataaaactggatttagaaaagctggcagtggcccagatttggtgtagctctccagcccctgctgttgatcacgtatcacacctgggctgccacatacagaacctggcttcatggcttctgcagccacacgggggctctcaggatgtggctcccaagccgcagtgctcacatgagcacctccagcccctgtgcaggcagcaggattgctgagcctgagagcccccacccctctgaaccctcaaagaaagatgcaggtctgttcgttgcctggtctcccaggcttactgagcctgcgctggggtcacccctctaccagcagccctggggccacactggggccaatacaggcactcagggcccagaggctgccaggaagctctgtcaccaacatcttcccgaggcaggccggccccaaatgagtaaggacagggctcagcttttttctcccctgtgctaagcaagggaggttcacttccctagtgagaacaattaaaaaaaaaaaaaggattcccagctgggctcagtggctcatacctgctatcccagcactttgggaggctgaggagggaggattgcttgaggccaggagttcaagacctatctaagcaacagagtgaaccctcgcctctaaaacaaatttaaaaattagccaggcatgttggtgcatgcctgtggtcccagctactcaggaggctgaggcgggaggctttcttgagccctggagttcgaggctgcagttagccctgattgtgccactgtacttcagcctgggcaacaaagcaagacaatgtctcagaaaaaaaaaaaaaagaaagaaagaaaaaagcattccccatctaactcagggctgctgtatttgccaagaaaaacctacaggcaaggtcaaaccaggatgtgaagttgtggtcatgtagagaaggtgagcatgccggggcagctcccaggaggatgttgtctgccccgcccctcgcccaacctgggaccctctgcaggttcacaaaggagggcacatgtgagcccctggcttccccagtcagtgtgtggggtcagctctcagcccagcccctttcatcgccaccagatgcccctcctcgcccttcctggtccacattttaccatcagcagctggacactagccctaagagcctagagggggtctgtgagtcatgggtgggggcagagcagcaaaggggtcccatgtggagtgttctgcaccccctccaagggctgcagagacagcgtcatggactctgccctctgctggacgggtccagggtggattgggcacccctgcctgcagctctcttctgcctggtgctgctccttcccttcctccatgccatccacttggctggcccagtctccagagctcaacaagcccccagggttgcgggagggctacctgctctctgggcacaaagcccacctgcctcagctactgaatgtggaggctttggtctgcagtctcaggtttgggttttcatcccgtttcaccagtggcctgacttctcagcacacagctgggctgggggcacacgtggccttgcttcttcggggctcctgacatcccctgcaggtgcccaggcctggatgccatgtggtcaccctatcaggcccagccaggcgtcccatcatgagacatgctcagcggcccccagcccatggagcccaggacccaatccagacactggcctgtaattcttttccttttgaagaccttaaattagaagaagcaacacgtgttcccatttcttgaaattggcagatattcggatttcatcgtgtttgctgctgcctttttttaaaaaaacttttttaaaaatgaaaccttatagacgaaagtggaatccaatctgagccctccattcctggtcacatctatgtcctctccccaggctacttactcctgactttctccttcctatcttttatttttaccattctaaccactttcaagtgtacagttcagtagtgttaagtatattcccattgttgtgcaacagatctccaaaactttttttttctgagacggaactcactgtgatgcccaggctggagtgcagtggtgtgatcttggctcactgcaatctctacttcctaggttcaagtgattctcctgcctcagcctcctcagtagcagggattgtaggtacataccaccatccctggctaatttttgtatttttagtagagacagggtttcaccatattggccaggctggtctcgaactcctgacctcaagtgatctgcccgccttggcctcccaaaatgctgggattacaggcatgagccaccacacctggcctctaaaactttttaatcgtttaaaactgaaactccatacccagacaacctccgcattccccttctggcagcccctggcaaccaccattctattttctgtctctatgaatttgatcagtatgtatatctcatataagttattacagtatttgtccttttgtgatgggcctgctttacttagcatgatgtcctcagggctcattcgtgttgtagtgtgcgtcagaattaccttccttttcgaggctgaatagtattccatggtatgtatgttccacattttgttcatccattctcccattgacagacgtttgagttgcttccacctcttggctattgtgaatgatgctgatatgaacatgggaaagcagatatttattttagtccctgctttcagtctggatatatatccagaagtggcattgctggatcatatggtagttctgtttttaacctttttttttttttgagacggagtctcactctgtcgcccaggctggagcacagtggcgcgatctcggctcactgcaagctccgcctgctgggttcacgccattctcctgcctcagcctcccgagtagctgggactacaggcgctcgccaccacaccaggctaattttttgtattttaagagacagagtttcaccgtgttggccaggatggtctagatctcctgacctcatgatcccccctcctcggcctcccaaagtgctgggattacaggcgtgagtatttttaactttttaaggaacttccatgctgttttccttaggggctgcaccagttcctattctcatcagcagtgcacagtttccagtttctccacaccctcaccaacacttgttatttattttttgttttgtttttttcccctcctttttttttttttgagatggaatctcactctgtcacacaggctggagtgcaatggcgccatcttggctcactgcaacctctgcttcctgggttcaagcgattctcctgcctccgcctcccgagtagctggaattacaggtgtgaggcactgtgtccggccttcctcctacctatttttattcatagatatagttcttgaacactttcagaatgttatgtaattcctgcataagtggtgtcactttacatacaacattctacaggctgtgtttttccactccacgtttgttgtttgccgtcagaccacattgatctgtatctctcattgcgtgagtagccccgggtttttatccttttccctgctggtaggcattttggttgtctctgctgggcagtcattgctctttgtggaatgcagttctggttttgtcagattgtccctcagccaggtactcggtgatcagtcatggtgggacaggtcagttctgtcactggtaatcccctaggtttgcagtatacagccaagatcagcaagctaaaaatagcagttcttacgtaaggtagtgtgggcagcccttctcaggacacttgtgatctgcaggggcaagtggaacgggactcgagggcccagcatcttctgttctgcaatgcatccaccctcacactggggccccactctggctttctactggtggccaggctcagaactgcagctcagtgacccagaaacactatgggtgtgatcagctcagccccaggcgtgccgtgtgtaccggaatgcatgtgtgcacgtggtggtggtggggccagctctcacctcttcctctgtagaggtaagagctgagtcatgcatggtgggccttgggacctgcttggaaccgtgccaagctacttatgaagcatctagtatgtgcttggcatggctccaagaattgtggacacaatgaacaagaagaagctcctgttctcatggagctaagaactgagcagggaagcagaaaacacacaagcaatgaatagacaagcaaacagcaggtcctgttaaatcccacaaagaaaaacgattgaatcccagagaagtggccagcagaccttttctacaaagggccaggtggtgaatattttaggctttgtcaccatgtagtccctgtcaccaacactcaactctcccattgcagtgtggaagccaccagagacaataataaatgaacgaatgtggctgtgtcccaataaatctttaacaaaagcaggctgagggccggatttgactctcagaccttggattaccaatgcttgtcctgggtgtgggaagaggctgcctgagctggggttgtcagggagaaccctttcaaaaaggaactgagaacccgttgcaggaaggagctgaccctgggacagcctgtctcaggtaggacacaatggcaccttgccaccgatatggtggcggagttatgtgctgagaaatgggcaggctagatttgagaggtaaagatgatgagatttactcatggcttgaatattggaggtacaggaagggggagattcaaggatgtgtcctaggtctggggtttgaactcctggatgaatggtggtgtcactgaaggagaggaagaggtgcaggtctgcggaggtttgttgttggatgtgttgagtttgaggagcttattagacaagcaggtgaacatctatgctgacagccctcctagagcttggagaggccaagactggaggcttggaatggggaatctatggcatttatggggtcttcaaggtcgtgagtctggtgggctggtgtgtgtgtggaccaagcagggggcgcccggcatgagctctgagttagtgcttagtgcttagggcaccaacagaggggcctgtgtggcctcacactccactcgggacggcagcatagtgcgagctccagggcccctgcctcctagcatcgcctcagttcccctcctgtaaagtggggattctgccttctggggttgggtgggaactaaatgagatagtcacgcttggctgacaggaagcactcggcgcctgtgcttgtgatggtggtggtgactgctgcacttcctgggtggttgcgtgggttgcagggcctgtgacagcttggtttggtggatggcagagtcagggttgggttgggggtagagacacccaggtctcctggcacagaccgttctgatgtcccgttgaggcctgttccgccctgtttttcaaggctccccagcggggctgaacctctgccctctgctgcccacagtagtagccggctcagtagcactttttttttttaagagatagaatccactcagtcacctagctagagtgtagtggcatgatcatagctcactgtagcctcaaactcctgggctcgagcctcctcttgcctcagccttccaaaacgctggaaccacaggcatgaaccgctgcacctggcctaagtagcacactttatcactgccttcccatccctgtctggcctccacatcccctttactgggaaatcccccttccctccccgtagttccctgtactcccgtctaagggtcagcttccgaggtgatgcttctcagtgctgggcaggcctgcgggttactgtgcgtagtcagtgggctgcctggcatggtgggttagtcagttgggggtgggcagcgtggttctgacacccccatgcctgagcctggacatactccttgtctgtctcctcctgcagccgccagctggagacgatggtggaccacttggccaacacggagatcaacagccagcgcatcgcggcagtggagagctgcttcggggcctcggggcagccgctggcgctgccaggccgagtgctgctgggcgagggcgtgctgaccaaagagtgccgcaagaaggccaagccgcgcatcttcttcctctttaacgacatcctggtgtatggcagcatcgtgctcaacaagcgcaagtaccgcagccagcacatcatccccctggaggaggtcacactggagctgttgccggagacgctgcaggccaagaaccgctggatgatcaagacggccaagaagtcctttgtggtgtcggccgcctccgctacggagcgccaggaatggattagccacatcgaggagtgcgtgcggcggcaactgagggccacgggccgcccgcccagcacggagcacgcggcaccctggatccccgacaaggccacggacatctgcatgcgctgcacgcagacgcgcttctctgccctcacgaggcgccaccactgccgcaagtgcggcttcgtggtctgcgctgagtgctcgcgccagcgcttcctgctcccgcgcctgtcccccaagcccgtgcgcgtctgcagcctctgctaccgcgaactggccgcccagcagcggcaggaggaggcggaggagcagggcgcggggtccccagggcagccagcccacctggcccggcccatctgcggagcgtccagtggagatgacgatgactccgacgaggacaaggagggcagcagggacggcgactggcccagcagcgtggagttctacgcctcgggggtggcctggtctgccttccacagctgacccccggcctgcagaacatctgtccccaagccagctccactgcccaggcccccaagagggcagctccagaagctgcccagggctccgggaccccatcccatggtggcaggtgcagcggtggggagtggctctttctggactcccagtgcctttttgctggacactgtgtccttatggcttcactgcaggtaatgcctttcccttcaggaagccccagaacacccacaggtcttggtaacaaacgccaccttacactctgcaggctgcagcggcagctccagatggcctcctgagctggacgaccccaggtctccagacatctagggaccagagcaggtttgggaacacagagggaagacaggatgggagtgtagccacagaacccacctgcaccctgacaggcacaccccactgaagagcctgagtcccaggaggcctcctggaagcccaggactgcccacccaccacgctggtgcccaccgcctggccagccaagccctgccgatcagacatgtgggctccccgaagcccagccagagactgccgtgctgtgggtgccaccaggcccagggactgcagcctgagctccccgaggcccagggcagccgggtgaggactctgtcctgtgtcacctctctccaggtgtccagctgtctcatgcctttttgtcctgtcctcagctctccgtgtggtcagcgaaaccattgttttctgttaggactcagttgcaagaacagaaaccctgcccccacttaataataaaaaagaaagtttattgatgggtggttgcaaaacaaacccaggagtgtccttgcttcagacatggctctgtccatggttgaaaatgtgctaggtggcaaaaatctaccactgtcccccacactgggagttcttgtgtatgctggctgcctgaaggagacagacgctcatgctgtgccttggctgggctcccccaggacacaggtctgtccgggtgccatgaccgtggcctgatgcctgctgccctattcactttggtgtgggcgatctcagtggatggaactgaggaaacaaatagccatttgtgtggctctgccgggcctcccaggctgagagcttccccgtgcagtcctgcctggccctggggctggtgctatggagagggaaactgggccccaggtacaccagcctttctcagagtgagtgtgcattgggcctggggctcgaggtcagcctcccaacgcctggccccatgctggccatggaactggggatcctttaacagtgtcccacgagtgcttctgcactagtctttcccagcgcctcagccttggcaggactggggcatggactggggttgctgtcagctagaagtggtgaccgtggggctgggagttccctgcccacgcagtacagcatctgaaaccccactgacagggcctctccctggcctagcaccatcctcctggggccagttctcagaggttcacgtgcagacagaaccctggagggtgcagttcgagtgcagattctgattcggcaggtcgaagcccagctcccagggcctgccgctaccaccacccacagaccacccttgaggtgacaaggcctgctggtggcctgtgggcaccctgtgagggaggcgggagggtcagtatttttgtttgtttgtttttgagacagagtctcactctgttgcccaggctggagtgcagtaatgcgatcttggctcactgcaaccttcacctcccgagttcaagcaattctcctgcctcacccctgccaagtagctgggattacaggtgcccgccaccacacctggctaatttttgtatttttagtagagacgagttttcaccatgttggccaggctggtctggaactcctgacctcacgtgatccgcctgccttggcctcccaaagtgctgggattacaagcgtgagccaccacacccggccaaggggtcagtatcaaagcgccttcgacctgccatgcttggcagaatgaccagtgtgggaggcccactggccttccaggaaggacctatttgtttacagtccctttctctcccttggcctccctgaaccacacaaactggttcaggctggttctgcctgggcagagggcacagggtgagacaggtcacggagctgggggtgacttcctggacagatctagtgccctctccaaaacccagcccgggcagccctgtccctgcaccctgggactgaagccagggcagggtgtgttggctgccaccgctggcctcttctcacagcacactcccctgcctgaaaaccctcagagcctgaaaggcagcgttcactaagataggagaggggaccacgtgcagctgagcccggccaccaccagcctcctctacagcttcctgccaagggggtccatgcacaggaccccaggctgactgagtgcagtgtcgtcctctccaggtcatggcaggcagcgccctggggtctggctgagtaggtgattctcatcccttagcccaggactcaggtctgtgtccctctcccctgcagggctggaacagaactgctgctgccccaagtcccaaggtgttagggcctgtaagggcccacggcttggggtggcccaggaccttcgcagagccttcacacctgcggtcttgctcccgcaccagctgggccatgccagctgctggggacaccgctgggagtgagacaaacaaggcccgcacagcatggtgggggagacacaggtgcagaagccagggtggagggtgctatgatggggacgggctgagaatgagtgagccacgcctgcctggtggggagaggacattccagcagagggaacagtcagtacaaaggcaggaaagggacccctgtgacctgagctgcgtggctggagctgggcccccagaggcacggggcagccacctcgggtgccccagagctgtcggagccttctgcacgcagcaaggctgatctcggcttttgagaatttgtcctgactgctgtgcatgggtggctggtgggagagggggtctggcagccatggaggccggcagctgtccgcttccctgggatccccaagggcggacctgcgcttcactgaggccacatctgcctccgattttggctctggctgtggactggaagccttagctgccctccttcccatcctcagctccttccaaggggcaggccccctcccctgttctgctgagaagttttttgtttgtttgtttgtttttttgaaacagagtcttgctctgtcgcccaggctggagtacagtggcacaatcacggctcactgcagcctcgacctcctaggctcaagccatcctcccacctcagcctcccaagtagctgggaccacaggcacacccaatggcacccagctaatttcttatttatttatttatttatttattgagacaggatttccctatgttgcccaggctggtctcgaacttctgggctcaagcaatcctcccacttcagcctcccaaagtgctgggattataggtgggagccaccacacacccagcctatgctgagacatccaacaggcactgagtgtcagcttccaggctgacagccgagggggcgccaggaagcagaatgacccccaggactgcatggtgtttggggccagtgtgagtttgaatgaatcggggtccctggccactgaggcacagaggggagtatgctgggagagagcagagccacccaaaatggaagatgtgggcctggccagtgggcccgggaagggaaggtgctgccctggaggccctgtctccaactcctatcaggtttattttccaccagagatggcctcctgggccaggctcgggtcgacaggtgaagctaggccagctgcccaggcagtccccggagagggccctgcctcaaggagcaagcacggaaggggaaggccagcctgtagagcttgcagccgtctctcctgcttcgccacagcaccgctgccagtccccttcttgggtggggaagctccttggaggctctggaagttgtcttcagtcccagccatgcagctgagctttgctcattgcctgcactccgcccccacgcctgggaaggtcaggaggcctcgggccgaggcctctgctgtttgcagatgctccctttccccagagctgagcctgaggtctggcaggagcacggggctgctgggccagggtccagcctcacgctcctgcctggggctttgcttgcaaggcctggcaaggacacgggaaccaactgtcctgccagccgagtgctgctgtccacctctcaaatcttcctcccagctgtgcctggactccatgtccctgccagaagccggtccttcgcacaggcagcatgggattcctgggaggcgcctgcctcgtcccctgcctcttcctaggaggtgcagaggggtgaggagagggtccgagaacaggcccatgcatttgaggggcatcagaaccccaccactccacccacaggggcaggccagaaccgctcctgcaggaatcagcccagagcagtgcagctcaagatggcaagtacagtcacagctgtgaccccagggctctttgggattgatgacagcccctttatttattattattttttttatttttttgagacagaatcttgctcttgtcgcctaggctggagtgcagtggtgcgatcttggctcactgcaatctctgcctcccgggttctaagcgattcttctgcctcagactgccgagtagctgggattacaggtgcgtgccactacgcccggctaatttttgtatttttagtagaggtggggtttcaccatgttggccaggctggtttcgaactcctgacctcaggtgatccacccaactcagcctcccaaagtgctgagatggcaggcgtgaaccaccgcacccagccagctctccctttagagctctgcaggatgcagtgttcccacgggacccagaggctgcagacactaaggagactttcacaaaggtcaagtagcccctacctgtgggctttggtggttgggatttttccatgccaagttttcttaaagatgggcccgccatcatgtatgctggtaacattggggtgttgcctgccagaggccagggagccaggcggggggttcacaggtccccaagaattttgtccctccttgatgatgatggggtgcaggtgctgatggtggcagcgactgccacttactgaggcccacccatgcgctggttccaaggaggcagagacaggtcacgtgaggccatcctaaggctaaaggagatatgtcatgagccctgagagagggatagacaaagccagagaaaggaactcccaaaacagctgggtgggcttcctggaggaggcggtgtttggttgagcctcagaggatggtaggactttatcagaggattgtagtctccacgaggactgggactctgggcctttttggtaactgtcttttcctgtccttggcactaaacatatgttgaatgaataaatgagtcaggtagaaaatggggctgggggcatcggggtagagaggatgataatgaaagcaactgagcttcaccctggagcctccaggccaggctgtggatgggaactggtgttcctggtgtatttctacaggagcagggccagcaggagggctcagcctggcccagggtttagggaacagtccccctccaagacgctaaatgtgagtggccttctcaggtggggacaggaatgcccaccccaccccacccaagtagcgctttctggagctgggtctgacttgatcacaggccgggctccaggcttccatggggctgtcgtccaggctggcaccagagggtttccgctggcctggccacttccctgcccagcctgttctttgaacaaggccagaaagaggcctaggagaaggcaaagccgctcctgggctcagcccctgggatggggcctggaggtgactcgaaggctgacccagttcccagccaggatccgctgccacccgggccacacgcgcaaaccaaggcaaccacttccgctggggccgtctctgaggagatgtgcaggaagtgaacttcctggggctgagggcaggggagaggccgcctcctaacacctcatgcccgcaggcccagggctgcccctcagcccttgctggctgggagaaggagggtcctctgcctctgtctgcatctaggctcttcacctgggaggcgcccacaccgtccatgcccgtgctctgcctctgccctcagcagacttgatggaaccggtgcccaggagcaaaacctcaggcaacgcaggggcccagagtgggcagagggaggggtctgcctcgacggcccagcagatctgggctccggcctgtcctgggctgcttgctgaccccatacccaccatttccccagtctgcctgtgaactttggcccggcccttcctgtgaacctggcacagaagccacctcctctctgaagccttcctggcttgccccaggtagtgtggatcacccatctgtgcccccagaggcccggtggcccctgctccagctctcccacctccactctctacaaggagcctcaggcagcctgtgccccccaaacctggccttggcatctgagctccttgaaagcacaggtgtttctcatttgtttttggcctccatggcccccaacccatggtcctgcaccgctgggcatcgcacaggtgcttcccttgcaaggaggaattgtcaacttccctagctcctggaggacactgggaagatgtcacagggatctcaaagcccatgtgtcccaaaatgacagcattggctttgcccaacccgcttgtcctgcctctgccaacacctacacctgggcaacccagccaaaccctaaggtgtctctcgaccctttcttgctccttccacctcctcccctacgccttccagggccccaggcccagaatggaggcatctgtggtgcattcaggcacctgaaggagtagccctgcaggagtagctcaggcgaggccacagaggcaggtgtgggccagtgtagaagggaggacagggagtgaccccagggagactccagcctcctctccatcatcccctttggcgtcagggctggaaactgggcccagagggtgggcgcaccctgcacttgtgtgtcagggtcgggccaggagcagagctgcggccagctgtgtggcctctggcctcccaagccccctctcctgctggcttccatcaccaccaccaagtccagctccgaatggaatgttccaatgctcagagcagagcagcaggcagggaaggaatggggatgtgggcaggcagagccagacatttctgggcaacaacaaggggaaatttcaatccttggagcatcagctcagggttcctgccagacattctgaccctgaaacacaggctttctggagaagagggcctgcccactgtggtcccaggctgggaggcagagagcctagggcctggggctggtcatctgggctgcccagaagtgcccgaggcagtccctgtctcccgcagcagcacagctacgcccatcatgcttcctctagctgcccacggcagcacctgggctatggggacctgggctccgggattctggagcagcacactgggacacttcgtacagtttgcaaattactaatacccttaaaataccaaaatgcctttggatttcagcagccaccagacctcctgggggcccccaccatgaagcagaggcctttgaacctcgcctgccccagccataaccacttgctggcacaacccaatccctgagggtttctttcccccacgccagagctggagttggtacagagagagcaagagtcaaagcacaactgctcagcaagttttgggggtcgggggcgggaggggggactgggcttctaacaagaccgtttcgtgggggccgggggtgctggtcatacaccccgtggcaggccacaggctccccaagccccctctattctgcgttcatgctgtttctgcaccttgaaacccggcacattcatagctccatgcccacgtgtggctgggagtgagctcccagggtggcagctgccagtggcacagcacttctccacccggaacctcctcttcctcaccttctgctgcacagcctgatacggctgaccccacccatatcctggctctagaaatgggcacaggacaggggtctaagcagccagtgcacccatcccccgactatagtctttgagggtcaaaagcctctactcccactgtgcagagggaggggtggtccctggagcacaccagcaggtgagtcacggtgcagggctctcaggagagtccagggaaagggatggaggtgaggatcttggggtctagattcattcccagaatgagcctgtccgtagttggggagcactgcacggttttaaatcagttacagagaaaaccacccagcaatgagcaactccaagatgtgaaggggagcattcagtagcacaatggacacagtgactggcgcctttgtgcaaacccaaaacaatggactctcactcagcaggtctccccctcacggctgatgaacatgagtcaaagccggaggaggcaacagaattcagagacaaacctcaacttagaggacactgatgcggaagaacccagcggcttccagggcttactctgttaaagcgcccgtgtccctactactaggtccaaggtatttctgcatattggtgtcctctccaaaggtcaaggagcaagcggttagggaaatcagtaagtcctcaaaggagtactgggagaaattagcatgggggccggacacacagttcagagagtggggacagccagccatgtggcgatgggtcatccctgccttgggacttttgttttcttttctttttgttttgttttgagacagggtctcgctctgtcacccaggctggagtgtagtggtatgatcacagctcactgcagcctcgacctcctgggctcaagcgatcctcccaagtagctgggactacaggtgtgcaccaccatgcctggctaactttttaatttttggaaagcttgggtcttgctcttgcccaggctggcttcaagccatcctcccacctcagcttcccaaaatgttggcagtacagccttttctttcttttttaaatcaaggtaaaacctacacccagtaaagtgcacagatcttaagtgtgcacctcagtgagattttgcacaaacacgtaagtgtgtaaggcaccatccagatctccagcagtcccagaagtctccctctagcccgtccccatggtacctgcctccaaaggttacttggtgttctgatttctatcacaagtttttcctggtgttttgttttgttttgttttattttgtttagagacaaggtcttgtcacccaggctggagtgcagtggtgcagtctcggctcattgtagcctcccaggctcaagcgatcctccctactcctcctgagtagctgggactacaggcatgtgctaccatgcctggctaactttttttctaaagatgagatttcagtttgttgtccaggctggtctcaaacttctggcctcaagtgatccttctgccttggcctcccaaagtgctgggattacagatgtgcaccaccatgcctggtcctgttttttttgttgttgttgttttttgttttgtttgtttttttttttttgagatgaagtttcactctcgttgccaaggctggagtgcaatggcgctatcttagctcatcacaacctccgcctcccaagttcaagtgattctcctgcctcagcctcctgagtccacacctggctaattttgtatttttagtagagactggatttctccatgttggtcaggctggtcttgaactcccgacctcaggtgctccacctgcctcagcctcccaaagttctgggattacaggcatgagccaccgcgcccggcaacctggccctgtttttaaaaaacgtcatataaatagaatcacactgtgtgcattgtgctgacttctttttttttgtgtttttttttttttagatggagttttacttttgttgctcaggctggagtgcagtggcacgatctcggctcactgcaacctctgcctcccgggttcaagcaattctcctgccttagcctcccgagtagctgggactacaggcatgtgccaccacacctggctaatttttgtatttttagtagagacggggttttaccgtgttgtccaggctggtctcaaactcctgacctcatgtgatccacctgcctcagcctcccaaaatgctgggagtacaggcgtgagccaccttgcccagctatgctgacttcttttgcttaaacttatgcctgtgagattcctccatattgttgtgggcatctggcatttgttcttttgcatcgtggtaaagtatcctgttttatgaaccttccacagtttcttacccacgcactgttgatggacatccaggtggtttccagtttggggttgttatgaataaagctgctacaggcatttctgtagatgtcttttggtggacagaaacactaggtacataactaggagtggaactggcccaccgggtatatgcatatctgattgagtagaggccgccagttttctgtagtagttacatgaatctgcactccactggtgtgtatgagggttccagttgctccacgccctcaccagcacttggtgttttcagtcctttcactgtgatcattctggtgggttacttggaatacaggtctcagacactgtcctggaatcggagctcgcctcaccagtttcatggggtcggtctggggacgggaggggcagctgttcctccagcattcaggcagagcgggtgcctgagactgacatcgtgtgggtgttaggcccagttccaaaccaaagaggcagtcagcatatttatggcatgcacaggttggcattggtgcaaaaaatgaaagaggagaaaactgcccgccagcttttaaatattttatttattcattcagcaaatatttgagtacctacaagcactggggctacaatggtaaataagacaaaaatctctcccctctgggagtccactctagtgaagggagacagacagtaactacaactgaaagtgtgttagagtggccgggcacggtggctcaggcctgtaatcccagcactttggaggccgaggtgggtggatcacgaggtcaggagttcgagaccagcctgaccaacatggtgaaaccctgtctctactaaaaatacaaaaattagttgggtgtggtggtgcatgtctgtaataccagctactcgggaggctgaggcaggagaattgcttgaacctgggaggcggaggttgcattgagccaagatcgcaccactgcactccagcctgggcgataaagcgagattccatcacaaaaaaaaaaaaaaaaaatgtgttagagtctctcatatctgtggcatctgcatcttttccagcactaggaagattcccagcaaagaggggccacactgtttggaaatacacgtgcctgccctttttagttcagctctgctgaggggcttgtgtgtttgctgaaaagattatctcaacattcttccccttgctatagattgtctcatttggggaaaaaaacatataatagagtgtattagcgagtagtaagtgctatgggtaatgacagagaagggaagagacggtgagggctgggtggctacggtttcagatggagcagccagacatggcatcactggaaaggtgaaattgagtcaagacctaaaggaagggaggcagagggctatgcagctacttgggagaagaatattccagacagagggaggagcagctgcaaatgtcctggggtaggaacctcctgagcctggaggggcctagagcagtgaatgaggcggagggtgccaagatgactgcagagaggtgagggggagaggagatggcggagggcctgggatatgccaggagccacagcgtgtggcacacacagtcttacttagctttttttttttttagacaggggcttgctctgtcacccaggctgaagtggagtgcagtggtgccatcatagctcactgtagcctcaacctcctcggctcaagcaatcctcccgcctcagcctctagagtagctgggactacaggtgcaccaccatgcccggctaatttattttttatttttttggagaggtctggctatgttgcacaggtgggtctagaactcccaggctcaagcgatcctcctgccttggcctcccaagtagctgggactacaggtgcaccaccatgcccggctaatttattttttatttttttgtagaggtctagctgtgttgcccaggtgggtctagaactcctgggctcaagcgatccttctgccttggcctcccaaagtgctgggattacagctgtgagccaccatgctgggcaggaactttgttttttaatgacaaggtggagattcctactagatatggagaggctgagtgggccagaggaaaatccaggctgcccaaacacatttgggagtcaccagtgagtaggcaagtcaggggctgggtgagtgtggataggaagagaaggctccaagaaatgagccctgggacaccccagggtctgcaggtcagctatcggaggtcggagcagcagaggagatggagaaggagcagccagtcccgctgcaaggggaaggccaggagagcctggggccagaggcgcagccaggagggagggaccaaggaaggggaggactggaaactgacctcgggcttaggaacgtggaggtcagtggtgcccttgatgaaggatcttggtggggtggtgggagcagatgcctgcgggaaaggaacgagaggacggaagagacagattagcagcggcaagcacagaaactcaccggaggaatgctgatgcaaagggagagagaagtggaaccaaagcgagtttggggttttgaaaaaatagcatttttgagatattgttcacatcccataagatccgccccctctttggagtatccaactcagtggtttttagtagtcacaagattgtgcagccatcaccactatccaatttcagaacagtttcatcaccccacagagaaaccctacacccatgacgagtcactacccgttcctcccacctcccagcccctggcaacggcgaacctactttccacctctgtggatttgccttttctgcacatttcatgtaaatggaattatacaatacatggtcttttgtgactagtttctttcactcggtataatttttttttttttttttgatggagtctcactgtgttacccaggctgcagtacagtggcacgatctcggctgacagcaacctctacctcctgggttcaagtgattcttctgcctcagcctcccgaggagctgggattacaggcatgcgtcaccacgcccagctaatttttgtatttttagcagagacagagtttcaccatgttgcccaggctggtctcgaactcctgacctcaagtgattcacccgcctcggtctcccaaagtgctgggatcacaggcgtaagccccgtgcctggccttagtataatattcaagattcatccatgtttagcgcggatcagtatgcaattcctttttatggctgagtaatagcccatcctatgttctacacattttgttattattcaccagatgatggacatttagttgtaatgctttttggctattgtgagtaatgttgcttgtgaacactggtgtgtgtgtgtttttgtctggacatatgttttccactctcttgggtatatgcctaggggtggaattgctgagtcatgcagtcactctgtttaacgttttgagaagctgtcaaactgttttccaaaacggctacatcattttacattcccaccagcaatgtacaaaggttctgatttcttcccaacctcatcaatacttgttattctctttattttaaccatcctagtagggaaaaagtggtatattgtggttttgacggctgatggtgttgagcctcttctcatgcgcttagtgtccacttttaaattaggacatttgcctctttttttgtagcgatggagtctcattatgttgcccagtctggtcttgaactcctgggctggcagaagcaatcttcctgcttctgccacccaaaatactggtattatagacatgagccaccaagcccagccacgtttgtctttttattgcttagttgcgagcattctttatacattctagatactagtcccttatcagatacatgatttgcagttattttctctcattccatggtttgtttttttcactttcttgatagtgcccaatgcacgtaagttttaaatttttgatgaaatcccattaacctattttttcatttgccacttgtgtgtttatgtcatatctaagaaaccactgcctaatccaaggtcataaagagttattcctatgttttcatctaagggttttatagttttagttgttacatttatgtctgtttagacttaattttttttttctaacaggaaaaaaaggaggattgctggattcaagcaatcctgtcacctcagccacccaagtagctgggactacaggtgcatgccaccacacctggctaatttttctattttttgtagagtcagggtctcactatgttgcccaggctggtcttgtactcttggcctcaagtgatcctcccaactttgggtcccaaaatgctgggattacaggtgtgagccactgcacctggctttgacataatttttttacatggtataaggtaggcagtagacttcattattttgcatgtagtcatgcagtagtcctagcactactggttgaaaagacaattattccccaacaaaattgtcctaatactcattgacattttggttgtttttaatattggagaacaaatgtgcgtgttcatgctaatgaacctgtggaggctgtggagagggggaatcagtgacacagagaggaagaggagaatgactagagtggcatcccctgatgggagagggggtggacctggtgtccagtggaggaggtggccttaaagcaaggtcagttcacagtaacaggaagaaagatggttgcctgagtgcaggtggagatggtgggcattctcttctggaggcttcatttttcctagggaaatgggaagcaaggtcaccactggagagaaagaacaggagaggaagggttgggagcccaagagagaagaggttagagggagaggaaatgaactcagagggggctgccatgttgctggcaattatcccgtattttcctgggataattgccagcaacatggcagccccctctgagcttagtgatgaagaattgaaggtgagagaagcccaggcatggtggctcacacatgtaatctcagcactttgggaggccgaggtgggtagatcatctgagatgaggagttcaagaccagcctggcaaacgtggtgaaaccctgtctctaccaaaaatacaaaaattagttgggcgtggtggcgggcacctgtaatcccagctagtagggaagctgaggcaggagaaccgcttgaactcaggaggcagaggttgcaatgagccgagatcttgccactgcactccagcctgggcaacagagcgagactctgtttaaaaaaaaaaaaaaaggccaggcacagtggctcatgcctgtaatctcaggactttgggaggcccgaggcggggggatcacatgaggtcaggagttcaagaccagcctggccaacatggtgaaaccccatctctactaaaaatacaaaaataaaaattaaaaaattagctgggcgtggtggcagatgcctgtaatcccagatacttgggaggctaaggcaggagaatcgcttgaacctgggaggtggaggttgcagtgagctgagatcactccactgaaatccagcctgggtgacagacgagactccatctcaaaaaaaaaaaaaagtgagagcagtcaatgtggtcaggtgtttttcttcagccatatctgatgaggcagttggagggagaggggataggaacttggggatgccatcatccaaggcctccacagcagggctgcctgttcctggggcaggacaaggctggtgcccagtggctgcagtaagtgaccctctcactggcgatgcttggagtcactcaggtaggtggtctcacccacacaccaggtctatttgacatctcaagggagggggaaatgcccctgccttaggtctggttagagagcacagattagggaagccaccagtaagccctcaactctcccaactcccaacctgtcagcttgggctgccatgacaaaatgtcattgattgggcagcttaaatttattttctcacagttcaggaggctagaagtccaagatctgggagccagcatggttgggttctggggagggctctcttcctggcttacagacggccaccttcttgctgagtcatcacatggaggagaaagagcaacagagccctctggtgtctcttcttatgaggacactaatcccaggatgaaggccccaccctcatggccatatctaaacccccttacctcctgcatcaagtccgctttcacactgctaataaagacatacctgagactgggtaatttacaaaagaaagaggtttaatgcacttgcagttccacatggctagggaggcctcacaatcatggggcaagacaaagaggagcaagtcacattttatgtggatggcagcaggcaaataaagagaccctgtgcagggaaattcccatttttaaaaccatcagattggctgggcacggtggctcatgcctgtaatccaaccacttttagaggccgagacgggcggattacctgaggccaggagtttgagaccagcctggccaacatggtgaaatcccatctctcctaaaaatacaaaaaagaaaaattagctgggcgtggtggtaggcacctgtaatcacagctactcgggaggctgaggcaggagaatcacttgaacccaggaggcagaggtagcagtgagtcaagatcagaccattgcactccagcctgggcaacaagagtgaaactccgtcaaaaaaaaaaaaaaaatctgatctcgtgagacttattcactatcacaaaaacagcacagggatgatccccccgcccatgattcaattatttcccaccaggtccctcccacaacacgtgggaattataggagctacaagatgaaatttggatggggacacagagccaaaccatatcaccttcctaaggtcccatctccaaacaccatcactctgggggttagggcttcaacacaggaattttaagggggacacaattcagtctacagcacctcccaacctgctcttgacctctaacaaggatatcaaacaagcccagatgctaaatttcagaacagaggagagacagaaaaaaagagtggttcctggctctgaaaggagtgtctgtatcaccggcaacctgagtggaaaagaaaaaagaaatctttcatttttatactttctattgtgtattttatagagttgtgattcccaatatgctagccactggccacatgtgactagtcagaattgagatgtgctagcaagtgtaaaatagacaacacgtttcgaaggcttaatatgaaaaaaatggaaatcatctcaataatcttttatattgattacatgttgaaatgataataggttggatatcaggttaaaaaacatattattaaattaatttcttctgtttgttcctactttttaaaagtgtgggttatgagaaaatctcaagttacacgtgactcactttggaggccaaagaagctccatcttggatactaatctgccaagttggcttctgatgaacccccattccaggaaggcctctaagatcccaatttctctatcatttcttgtatgattgcaggtacttaccataaatccttaggtcaaacaaccttgatgttatcctacttcaactgtctacacatcccttctgaaccaccctcccctctggtatacaagtcctgggtcttgggggtgatggcgcggggtccaccatcttgtcttgccactgccaagacacagacatggcttctgtccgtaagtccctactgaatgattctttctaaggaactagatatgccagcctctttctttggcctctcagcttcctcagatgttggggtaggtttgtatacacctgcccatggtaaaactcacgtttggcttgtattctattcatgttggatagcgctgacatagaagaacccaaaacagcccccagcacagccggccctcctgccttggtcagtgggaacaagcacatcagatcaagctctcatgggtctcaggatctgggatggtgctttggaactgaatgttgtggtgggaccacttctctaaggacggcaagatccaaggtgggctgtgagcactcttcctgagtgatggcctttaacggtccccagaggcagccccagggagatgaggacctggctggctgtccaaaaatctgatcaggctggctcttgtttggtttagggatacataaataactcacattttaaacactagaactcaggcatgagacgcccatgcctgcctgtctgttccctctgagccatgccttcatcgggtgggagaaccactaggatcacagcaccatctgcaatccctcttttttctttttttttgagatggagtcttgctctgtcgcccagggtggagtgaagtggtgtgacctcggttcactgcaacctctgcctcctgggttcaagcaattctcctgcctcagcctcccaagtagctgggattacaggtgcccaccaccacgcccagctaatttttgtatttttagtagagatggggtttcgccatgttggccaggctggtctcgaactcctgacctcaggtgatctgcccgcttcagcctaccaaagtgctggcattacagatgtgagccactgcgcccagcctgcaagccctctttcttatttcctccaagcactgaagcatgaatttgtggtaaggtaaataaacgtgtgtgtgtggcatggtggggggatacatccacagaatgtcacgtgcccagccctgttctctgtttgttacacttgactattaggattccagcctcttgttcacatacatagtctaactatttcctttttggtcagaattggaattctttcccttttttttttcctgctattataaacagcagtgctatgaatatctttattgttttccacttgaattattttattggaatgttttccctgaagtgaaattggttggctgggaggtatatatgattttatagttcctgtgattttccttttcatcaaatcactctcccaaaagactgcattgctatgtatcgccttctgcatgtacgtgtgtgtgtgtgtatgcacgtgcgtgtgtggacgtatgtgtataccgttttccctcagccctgccagctgtgggtttgatcatttgtatttatttttactaattaacatggtatataacagatatctcctggatattatatttgcatttgcttacttgctaacaagaatgagtaaagtccttctcttaaaacccagaaaaataaaataaacagccaccacatccatggcttagaaaaacacctctcagctccctcctatgccaggacttgggggcacccacagctgacgccaaggctgcgacacggctggccaggcccgagcttggcctgctgacctgtggctgtcatcatggtcctagaggcctcctccagctaataaagccatttctctcctccagccaataaagccatttctctcctccagccaactgaaggcacatcaggcaatgccctcttctgcatggcttagatgagtcctgcatttcttaattcccatatgttcgttgttgggattgagagacattctgttttacatgcaaaaaaggttgcaggagatgcggctggtgtcctgtccacagcttatgaaaacctcagggcagcctccgcaccctccccctggggaagttacaaaacagcatcctctgagagccactgtctgggcctggcctggcctggccgggacctggggagaggaggaggaaggccttgcctggctggcccaccagagggcgcctcccaccacaggtgccaggctgtgtccccagccctgtggcctcctggctctgcacacaacagccaggcctgcatccctccagccagacatctcagcccagagacacaaagcagtcatccagctaaaacgtaccatctgcctgggaacggcaacactgaagcaggttaatagctggcccagagcagatggtttattccaatgatgactgggtccctgtacccaggcgtcttccttagtgctgcctcgcccaccggcagcccgcagctctccctgggccaggccccactggaagggccagccctgctgcccagaaatcctgccactccgccacccagacaccgaacacccagacacctaacacacagacacctgacacccagacacctggacacctgacacccggacacccagactacctgacacccggacacctggacacccgatcacccagacacctgatacccagatacccggacacccagacacctgacacccagatactgagacacctgacacccagacacctgacacccagacatccagacacccggacacctgacacccagacacctgacacccggacacctggacacccggacaccgagacacctgacacccagacactgagacgcctgacacccagacacctagacacctgacactcagacacccagacacctgacacccagacacctggacactcaacacccagaaacctgacactagacacctgacacccagacacccagacacctggacacccagacacctgacacccaggcacctggggacacccagacacccacatacccatacacccaaaaacttgacagctaaacacctggacacccaacacctagaaacctgacacccagacatctgacacccggacacctgacacccagacacacagacacccagacacctgacacccagatacttggacacccagacacctggcacccagacacccagacacctggcacccagacagtcagatacccagacactcagacacctgacacccagacacctggacacctggacactcagacacctgacactcagacacccatacacccagatacctggaaacccaaacaccggacacccagatacccagacgtctgacacctggacacccagacacctgacatccagacacccagacacccagacacccagatgcccagacacccagacacctgacacctgacacccagacacccagacaactgacaccctgacatctggacacccagacacccagacacccgacacctgacacccagacacctgatacctgacacccagacacccgaatacctggacacccagacacctgacacatgacaccaagatactcgacacccagatacccagacactcggacacccagacacctgacctccagacacacagacacccagacacccagatacccagacacccagacatctgacacccagacacctgacacccagatgcctgacacccagacacctgacactcaggcacctggacacccagacactcagacacccagacactcaaacaccagacacccagacactcaaacaccagacacccagacacccagacacctgatacctggacacccagacaacctgacatccagacacctggacacccagatacccagacatgcagacacctgacacctgacacccagacacctgacacccagacacctgacacctggacacttggacacccagacacctgacaccaagaaacctggacacccagacacccaaacactagatacccagacacccagccacctgacatccagacacccagacacccagacagctgacacccagacacctgacacccagacacctgacacctggacccccagacacctgacacccagacacctggtgggatgtccgggtgtcttggtatcaagtgtctgggtgtctcggtgtcaggtgtctgggtgtctgggtgtccaggtgtctgggtgtcagctgtctgggtgtctgggtggtgaggtgtctcagtgtctgggtgtctgggtgtccaggtgtccaggtggtggggtgtctgggtgtctgagtggcagggtgtctgggtggcagagggtctgggtgtttgggtatccaggtgtccaggtggtgggttgtccaggtgtccaggtagtggagtgtctgggtgtctgggggttggggtgtctggatattcgagtggcagggtgtctggatggtggggtggctgagtatccaggtatccaagtgacactcggacacccaggcacctgacaccagacacccagacacctggacacccaacactcagacacccagacactcagatacccagacacccagaaacctgacacccagacacccggatacccagacacccagaaacctgacacccagacacccagatacccagacacccgacacccagacacccagaaacctgacagccagacacccggatacccagacacccgacacccagacacccggacactcagacacccagacactcagacacccagacatccagacacctgatacccagaaacctgacaccccaccacccggacacccagacatcctgccacctgaacaccctgccactcagtcacttggacacctggatactcagccaccccaccatccagataccctgccactccaatacccagacaccccaacccccagacacccagacactccactacctggacacctggacaacccaccacctggacacctggacacccaaacacccagaccctctgccacccagacaccctgccactcagacacccagacaccccaccacctggacacctggacacccggacacccagacacccggacactcagacacctcaccacccagacaccgagaaacctgacacccagaaacctggacacccggacacccagacacctgacaccaagacacacagacacttgacaccaagatagccggacaccccaccacccagacacctggacaccctgccactcagccacttggacacctgggcactcagccaccccaccacctagacaccctgccacttggatacccagataccctgttccccagacaccaagacacccagttaccccaccacctggaaaaccctccacccagacaccctgccacgtggacacctggagacccctccacccacagaccccaccaccaggataccctatcacccagacacacagacacccaaacaccctgccatcccaccacccagacactctgtcacctggacacgcagacaccctgctgtcccaccacccagacaccctgccaccctgccacctggacatgccaccacctggacacccagacaccctgccactcagccacctggacaccatgccacccagccacccggacacacagccacccagctgccccgccagccacatgtggctgactccctgctcaccctcccaactgcgtcagccatagggaactggggtggggtcccagcacccctgggcaggcagttccataggggattacctccagctgtctttcacagagagacagccaagctacagatcaatcaaccccattcataatcaaagaaaatgaatcaaaccagatgtcagtagtcacccatgaaattaatcaaggcataagacactagcactctgctccttggtggggatgcaatgagatgtgtgcccccttgatgggagagtaagttaatgataccgcctctccagaaaggattctgacctaataaaacaaccaaccttaaaaaaagttgcatacttcacggggcacagtggctcacacccataatcccagcactttgggaggccgaggtgggcagatcacttgaggtcaggagtttgagaccagtctggccaacatggcgaaacccagtctctactaaaaaatacacaaattagccaggcgtggtggcaggctcctgtaatctcaggtacttggaagctgaggcaagagaatcatttgaaccaaggaggcagaggttgcagtgagctgagatcacaccactgcactccagcctgggcaatagagcaagactccgtctcaaaaaaaaaaaaaaaaaaaaaaaaaaaagctgcgtacttttaaatccagcaatttcactttgaggaatgaatcccaaagactatataccagaattcaataaagagaatattaacacagtattactgtaatacttcagcattacagtagtaaaaatccacaaatggaattcacaccaggcacatggttaggcacagtggaatattatgcagccattacaaatatttacaaggaattttaaattacatcaaaaatattatttaacattcattgatacaggtgttcaaaggggcatataggataagaaggcaagtacgttagaaatatacatacataggccgggcgcagtggctcacgcctgtaatcccagcactttgggaggctgaggtgggcagatcacgaggtaaggagattgagaccatcctggctaacatggtgaaaccccgtctctactaaaaataaaaaaaaaataaaaaaataaaaattagccgggcatggtggcgggcgactgtagtcaaagctactcgggaggctgaggcaggagaatggcttgaacccaggaggcagagcttgcagtgaaccaagatcgcgctactgcactccagcccgggcgacagtgcgagactccatctcaaaaaaaaaaaaaagaaaaaaagaaaaaaatatatgtgtacctacatagcattaaaacaattgcaggaaagacaccaaatctgttaccagcagttttctgggttgtgaaatttgtagtttttatttcattatattttctgggtttttctaggttttcagcaacaaatactgacaaaaggaaatgaacagttttcagagacttactttaaaacagagttaaaggaatacacatgaaattggtaacagtggctgcctctggggtcggcataggagcaggccttcccttgcagcttgcgccctcccgtaccttttaaattttgtaccaggcaggtattacttattcaaaaataaataaatttctacaaagaagatacagatatataaatactaaaaccacaggagctgagaagcagcgcttgatttcctgggggaaatcaagaaaagtgctttcggctcctgggggagataagactccaggttcaggctgcccttttaggcccaaagcctccaagtcaccccaggacccagctagttccagtgtcttcactcagcaaggcctgctccatcggacacaaaactgatcaggagttggaccatctcctccctgggcatttttccctgcagtaggggtgggcaggctgtgggaggggctgcagtggacactgggcctctgagctgggaccacctgtgtcccctgggcctgacacagaccaggacctgatgcacgagtaagaatgaatggggcccaatcgcctaacaaaggcaactcaatttcagccccgattgttccagaaggatttgctgtaagcaaccggagaagttggcatttgttcaacatggaaaaagtgtcccccaactttgaagcactgaaccaaacatctttgttgaggtttcattctcacgatatctgcaaatcaacgttttttccttcacactaaaaacgggcaactttagagcccactaaagctatacaaaattgggagggggcatgctctgattttccatttttagttccagggtccgtatgcaggacttatttgcaggaagagcaggaatgatcagttcaacaagaaaagccacactcagttttcacagacagacaacccctccttcccacccctgccctgtcccccatcaacttaagtggcatataaatgattaaagtggcttcattaactccaggagtgtggcctgtgctagggcacctgatttgtgctagacgaggccagcagaagagcaatcgctctgcaagagaaaggctcggcccttccttaatcaccatgggttataattcaccctgacgtccttacacacatggaggtgccaggatactgagctttcctataagcagggcctcagcagaagtgcctccctccgagcctccagggcctgagaggagagccccaagtccctgccctgccccaggacctggggaccaaggaataacattttttgtagagatggaggtctcactatattgcccaggctagtttcaaactcttggcctcaagcgatcctcccactttggcctccaaaagtgccgacattacaagcatgagccacctcacctgacctactcttgcattctttaaagccacaaatctggtaccttccctcttgttccatttgtaagactttgaatattagagatattttacacataatatgtgggaaaatggctttttagaaaaacatttattgtaatcgatcacattcaagtcgtagttctgaaagcaaagtgaaaacacacagtacagctatgcctcagtatccatgggggatgggttccaggactgcaacctcaaccctcagacaccgacatctgaggatgctcaagtccctgatgggcaatggcatagcgtttgcacgtaacctacgcacaccttcctgtataatttaaatcatctctagatttcttataataccaaatacaatataaatgctatgtaaatatgctacaccatattgtttagggaataatggcaagaaaaaaaggtctgtacgtgttcagtaccaatgcaatttcttttttcaaatatttcctatccaaggctggttggatctaaatgtggagaccacagttacggagagctgactgtactggggaaatctttagggtagaaacatttcttagagatggtttatatcacaccacttcagaaagagcaatacaggcatacctcattctactatgctttgtgaatactgtgttttttttttaaattgaaggtttgtagcagcctggcatcaggcaagtctatttggcaccattttccaacagcatgtgctcactttgcgtttctgtgtcagcattttgaacagtaaatatttttaaattaaggtttgtacatttgttagacataatgctattgcacatttagtggactgcaatatgcagtaaacatgacttagatgcactgggaaactaaaacaatgcgcttccttgctttattgtgatgttggctttaccgaggtggtctggaactgaacccacaatatctccgagatatacctgtactttttactaaaaatatttcatttgagaagtaaacctcaagaactaccaggacttttcagatgggaagagcgaggccctggcagggcgagtctaggtgtgcagcctagtgggggccggggtcaagtccactcggtatttgtggcttcactcagcaggccgcccgtcccctccgtggggccattcgacagtccctgggtaggggacggttgcactaggaggtaaacatgattccagcatgggctgctccaaggccctgagaccccaggacctgcaggggggtgggatccagtcctgcagcaggtgctctgaagaggagtcatctcccaagatgagaaggccccggggggaggatgaagtgtggtcagaccgtcggctgagcgtgatcacttccccagacccatgcgggtgagaggactcagcagacgcctccgaagcctgcggcaggcaggcctttactcttcactggggggccagtcagagggctgtcatggcaggccagtgcacatgccaccaacacatgctgcttcatcagtaatttctggaacatgacactgcacagcggtggcctctccagcgggacattactagtaatacactgatgatgtggagattccccagggggcatccgctgggcttctcccaactcccaagccacctcttcagaatcacagagtcatttaaaggggccccccacctccccggaggtgcggcctagtcatcatactggatctcggcccgcagctccttggtgacgtagttcaccagcatggccagcagctgctgctgcagggcctcgctgcccatgaccagcgcggtcagctgcacggcgtccgtccactccaggtgcctgatgatggctgcggcttcgttaaagagcctctgttgctcggcagggggcagctccattaggatctgaggaaccggcttaaactgtccacttgtcatccaggcacctaacagccccccgacagccccccctagaaaacatggaatcgttcaattagtgggtcttattcataagcgatggccttacttaagttcccactgagtgcacaccaccatcaccatgagcaggcacattcatgagcgggctgcagcgggctcagccggtgccacgcctgctccgccagccagtgtggagggcaaaggtttatgcagtcttctgtccatttggctcagataattgacacccaacatgcattccctgggctccacatttaaggatgcaaaatgaagcctgcctgccccatctcccacctcagtgctgggcccactttcttcttcatgagctgacggaggtttctgggcttactgtaaaaatccctctctaatcacaaaggagaaggctgagaaacaaatgcattttctttttcttttcttttttttttttttttttttgagacggagtcttgctctgttgcccaggctggagtgcaatggcatgatcttggctcgctgcaacctctgcctcccaggttcaagcgattctcccacctcagcctcccaagtagctgggattacaggcgcacaccaccacacctggctaatttttgtatttttgtagaaacagggtttcaccatgttggcaggctggtcttgaactcctgacctcaggtgatccgcctacctcggccccgcaaagtgctgggattataggcatgagccaccacaaccagccacaaatgcattttcaagagaaaccatctcaggctgggtgcggtggctcatgcctgtaatatcagcaatttgggaggccagggcaggtggatcacctgaggtcaggagttcgacaccagcctggccgacatggtgaaacaccatctctactaaaaatacaaaaattagctgggcttgggggcacatgcctgtaatcccagatacttggaagctgaggcaggagaatcacttgaacccgggaagtagaggttgcagtgagccgagatcatacccttgcactccagcctgggtgacagagcaagactctgtctccaaaaaagaaaccatctcagtggtgagactgaatttcctccaccaggcagctgatatgctccttgcccctgaacttagaaaatcttcagtgagcccatgtggttaaaggacctggggacagataaggaggctctttcctcttgaagcagtgcttttcatagatcccctccaagttgtatgatcgataaataacaaactggccgggcgcagtggctcacgcctgtaatcccagcactttgagaggccgaggtgggcgaatcacgaggtcaggagttggagactagcctggccaacatggtgaaaccctgtctctactaaaaatacaaaaaattagccaggcatagtggtgggtgcctgtaatcccagctactggctgaggcaggagaatcacttgaacccgggaggcagaggttgcagtgagccaagactgtgccactgcactccagcctgggcgacagagtgagactccatctcaaaaaaataaaaataaatatcaaatgtaaggtagcttactatttctacttctgccaccctaaaagggcagaaacattattgttaaatgtaaactcattgccaaggctatgtcatgctattctgggacttaaagaccttgtatccacggaaagttctacctgaagaggccacgtgcagaatatggtgcagagaagcggaaggtgccctagggaaggggtccaaagtcaagtgcctccaagagccagggaggaactaagaagagtgaaggggcggttgggccttacccggcctctcccctgctgagattggatgggtggcaggctctgacttcatcccagtctatagtctgggccaaccaagccttgaatcgcatggaccttccgaggcccaggacacagaagagctggacagcttggttcctatggagtggcagtggctacttcacgccagttcattgctaccacacaaaataccagatttgtagctttaaaacatctcacgatttttaaatatcaccaatcagatatttaaagatgaagcccactagacttagtgactcactttcaacagacagagtatggaaagggaaacagaaactttgcagtggaaaaacccagcaaacatgcccttaaccaagtgttcaaggtgaatatcactgacgtcatgtgaatatcacacacccccagaattaatgcaagacaagggagaggggcatgtcacctcccaggcatgcctcccaaagactcctaactccagtcccatcctaaacacaactggcaaattcaaactgagagatgttctacgaaatacctgcccagtactcctcaaaactatcaaggctgtgaacaaggcaagtctgagaaagtgttaaaggccagaggagactaagaaagcaggcgattcaatgcaatgcggtgtcttagactggatcctgaaaccaaaaaaaaaaaaaaaaaaaaaaggccattaatgcagaaactggtgaaacccaaatcaagtctggagaatggttaatagtaatgtattcgttggtgttggtttcttaggtttttttttttttttccttagacagaatctcactctgttgcccaggttggagtgcagtggtgtgatcatacctcactgcagcctcaaactcttaggctcaagcaatcctcccaccttggcctcctaagtagctgggattacaggcatgaaccaccatgcctggctaattttttttttattatttttcgtagagacggggtctcattatgttgcccagtccggtctcgaactgctgggctcaagcaatctttcagcctcaagcctcccaaagtgctgagactacagaggcatgcgccactgcacccagcccattttagttttgacaagcatacagtaatacatgtgatcgctaggagaaccgaaactggatggaagatatacaggaatcctttgtactatcttcacgacttctctgtaaacctaatattattgggaaatgaaaagtttctttcaaaaatgcaacccaggccagagagaacccactggcaggctggactcagacaacaggcagcaaaaccagcgcttgcttcttctggaagccaagcaccgaggcccctggagcagacaccaccccgggtactgagctggggccagccccatatcccagaggctgaatgccacacgcagacagggttcacctcctctgcaaaagaaaggcacattctgggaagggaaaaccagctaatttacaagttttactgaacttttccccatgacaccagtgaaatgctccaagtcgacaagagttgcactcatgtgcactaaacctttatgagaacatcaatatttgatttagagcagcacttaatgcaaaaagtcgccaggaatatcgaccagcaaattactggctctttggagaggagaaaattcctttgttttcagggtaaaatgatgctcccgcccatgaccagggactggaagtagtgaatcccccgggctctcttagtggacatcctgttctctaccagcttttactcaatctgaataaaatatgtgctcccaaaatagcatctgggcacagctatatgacaaaatgatccccaaagccttcccctgagcactgagatggaggtgggggcacagatgcacagtgtcatcgaggaagaaggaaacagccttgtctcccccatctccggttccttcccggatggcaagatgctgaagtcaggcctcactaattcatggagtttggaaaggaaaatatggaaagggaaggtctggggccacccacacatttatttttctcctcagtgtgagcctcagcttaacgaaatgtccttgaatgtcaatcccactacagaagggaagaacagggcaggaacccggccagcgagctggggaacggaagccaacctcagcagaaaagttcagctctctgactccatctatggtttgggccacagccccaggccaggtagaccttctgaggctcaggacacaggaattcttccttccccaagccaaagaaagtaacttcatcccagctccaaggaacagtggaaaaattagccaaactttcattcattgcctgaaattgattctcaaatagaagcaggtggtaaatggccaggcacagtggctcacgcctgtaatcctagcacttcgggaggcccaggcgggtggatcgcttgtggccaggagtttgagaccagcctggccaaaaggacaaaaccctgtctctactaaaaatacaaaaattagccgggtgtggtggcacacacccgtagtcccagctactcaggaggctgaggcaggagaatcacttgaacccacaaggcagtggttgcggtgagccgagatcatgccactgcactccagtgtgggcgacagaatgagactcggtctcaaaaaggaaagaaaaaagcaggtggtaaaggaggtgggcaggccctctaagggtgaaaggcagttcttttggtggtctctttcagaacaagggagctctctcagagtgagctggctcacatgaaatggccacaccatatgtgctgagaaggtgcatggctcctcccagcctcctccctggtttcctttctgcagggacctcacagtcatgaaggccaccatgggacccaggacaccctggtatcttcagaggcctgctgctctgatacttattctgggatcccagcactgggggaaagatgcctctaggcccaaatgacacagatgccatttacaagagtaccccacacttctgagacattcacacagaagcctgcatttccaatggggcaaattatatctacaaagatcatttcccagaggcatctttaactccaccaactcctcccacaagacgcatggcaccacttgtacaagttcatttctccctgtgtttcttttcttttttctttttccttttttttttttttctttgagatagagtctcgttctgtcacccaggctggagtacaatggcatgatcttggctcactgcaatctttgcctcccgggtttaagcgattctcctgcctcagcctcccgagtagctgggattacatacaccagacacccgccaccacgcccagctattttttgtatttttagtagagacggggtttcaccatgttggccaggctagtctcaaactcctgacctcaggtgatccgcccgcctcggcctcccaaagtgctgggattacaggcatgagccacactgtgcctggccttctccctgtgtttcaacggcccttttatgacatccccgaggctggctatctctgtgagacacctgcacttaccaacggcgagtcccggtgggccgcccaccaaacccccgacgaaggccatggcccctgtgaccagggcacccttcccagagtgcttgacagccgccttcatcttcctctccccagaaagggagcacagcagcttcatgatgtcctccaccatgatagtcatcgtggcgggccttcgagggagaagttcagagggacagtttcaatgagcataagagtatttccatcacaatgccactctagttcctagagttttaaggaagggtcccccttttcaggaaagctcagcagctccaagcgcctgtatgacagacagcatccagacggtggaaagttcccacagacaggacaggcagcagttagtgaataagcaaatagcagcagctgagtggatgaaaggtcttctttgccctctgattaacttctgacttacgacagattaaggagcaacccggccacatgttctgctggttcatcacgagggaggtggtctgacccttctggcattagtggcctttgcactggcccggggaatgccctgcacacaaagcccagcagagaacgggaagtcccggcgtgaggcatctgagctgaggccaagccagagccagggaagggatgggaccctgtgaccacacgggcactgacctgcagtgggccctgagcagagggtcagatacctcccttctaagacggagacagtccctacaggctggactctcagacagtgccagcaggatgggcaggaagtgcctggcgtaagtctggaagcctgcaggctcccgacccaggatggctctgaacgaacactgttactaacacacacactgggctgccttaagcaactgttcttaaaagtcaacacagttgtacccatgggacactaaaagcagggaaaagataaagcagggagacaaagcaactggagaaaaaatacatgaaatcattcccaggctttgcaatatatatgaatagacagacggacgggcgagtagacctttagcacaatgacctttagcacaatcctccagggtagggaaaatgtgtggcatgctggagccagggcagggagagacgggctctggagagcccaaaggctgagaaaatcaaaggggccacgaggtggggggtctcctcagagctctggctgagcccaaggctccagcagtacttccctttctcaccagcacttcccatttcattctaggtggaaatattgaaacaggtgctacagcaattcaactgaggaagttatggatagattctattgcttattatcttttttttttttttttttgagatggggtcttgctttgttgcccaggctggagtgcagtggcatgatcacaactcactgcagccttgacctcctgggctcaagcgatcctcccacctcagcctcttgagtagatgggactacaggtatgcaatcaccacgcccagctaattttatttttatttttagtagagatgactactatgttgcccaggctggtcttgaactcctgggctcaagagatcctcctgccttagcctctcaaagtgttaggattacaggcgtgagccactacatttgaccttaatatctttgggttatatgttttatgaggtttttttgttttgtttgttcgtttgtttttaagagacagtgtctcttgttgcccaagctggtgtgcagtggtgcgatcatggctgactgcagccttgaactcctgggctacagtgatccccccacctcagtctcctgagtagctggggctaaaggcatgcaacactacgctcagctaattttttgttttcatagagacagggtctcgcaatgttgcccagcctggtcttgacttcctgagctcaagcaatcttcctgcctcagcctcccagagtactgggattacaggtgtgggccaccgtacccagacatgtgtgcttttctgacccaaggatgatccagaagcagaagtccctactgtaaaattgctctcccaatcctgggatataattttgagcccagagaacaaacccatgaatccatgagaggaccgcaaagccaggtcctcagaacttctctgcagtcccaggagagcatcctgcgctcctgcccctgtaaatttcccttctttttccccgttggtacacattagacctgtgattctccacaagtgcacgggaatcactgaaaaccttgtcagatacagccagtatgggagggtaagattctgcatttccaacaagcccccaaagtgctcctctgatctcactttgggcagcaagaccccaagagggcataacgcaggactctgacattcgttactcagtcttcaaattcagaaattgcaaacaagcacccctagatatgtctttttgtccccatggagtatgagaggcagtgggagggcaggccttgtgagccctgctcacataagggactggaggagcactcaggcctgggggtccctgctctggctaccctgtgccctgggtctcccaaaacctggtctcctgctttccaggccctgcccagctcctttgcttgctgacaggttgaatgcctcctccttctccccagaagagaacccccttccactattccagtggtcaagatttgtttacatacaaatgtctaaacgataaaatggcattataacagtgtcaggactgaacaggcagaagccacctggaaatggggagacggagcgcagaacctgatttatccagtcaccatggtcctgaaaagctatcacacaaacaaaatgacatagatagctagatagagatatacagagaggttttttttttttttttttttttgagacagagtctgctccgtcacctaggctggagtgtagcggcgcgatctcggctcactgcagcctccgcctcccacgttcaagcgattctcctgcctcaacctcccgaatagctgggactacagacatgcaccaccacacctggctaatttttgtatttttagtagagatggggtttcaccatgttggccaggctggtcttgaactcctggcctcaggtgatctgcctgccttggcctctcaaagtgctgggattatgggcgtgagccactacgtccagcacaaaatgagatatatttgaagtacatattaaagtaaccaaaggaaataattttacagtaaaatcttacaaaaagctcaaaatcctggtgtaaaatatctaatcacctttgagcttagttctggtttatatccagcttttcatctgtcaattatattggaaaaagagaggcactgcccaggtctcaggagggcccctttggaggctgcaaggaacctccctttccccgggcgtgaagaccctgagccctgccatgcttggtctgcaaggctggcttccaggccagcacccagacaccactcccaaaacaggttttctgcagttttgggtctgcactctcaaaacagtttctgcacagcaagaaaatgcatgtagaagtggaaagaaggaaggcaggaaacagatacataaccactttagctctactggcttccccccccaaaaaaaacctagcttccgacctgctccgaatgacttgaggtgaaaatctacagaggctaaagagatgtccttgcaaaaatgctacttccagctctacctgctccagccaggccagcatcaatgtgagaggagagagagaaatcaattaggcaaatagttagggcaagggtccttggcagaattcccttctaacaaaaagcagcctaagaagtcgttgccctttcaggaaacacagataaggaaggcaagctctaacacagaaagcgggtcccctgtgtgacatacagacatatggtgggccccagtaagcacagtcctctcccttcttagaaatactcaagacacggccggccacggtggctcacgcttgtaatcccagcactttgggaagccgaggtgggcagatcacgaggtcaagagatcgagactatcctggccaacatggtgaaaacccatctctactaaaaaaatacaaaaattagccaggtgtcatggtgctcgcctgtaatcccagctacttgggaggctgaggcaggagaaccacttgaacccgggaggtggaggttgcagtgagctgagatcacaccactgcactccagcctggcagcagagtgggactccgtctcaaaaaaaaaagaaaaaagaaatactcagacacagaggcttgcatggcactgataagaagagctaccctggaccaggcatgtctaccttggagtgttcttcccccccaccacccaacctttttcacacatgcacagtaggaagaaataagcaacatggagtagtaactcaggctaagaagcccacatgtgcactagaaacagtggggcgggggactcagaaattcgcaccttatgtaaatgaagcacccctcccaccagcttttctataaaaacccttgcatttcactgtaaaatggcaacccatctttctgggacccctctctgatccagagagctttctttcttttgcttattaaacttctgctctaacctaccctctggagtgtctgcgtccttgatttccttggccatgagacccagaacttcagtgatatctcagacaatgaggcaggtttcactgagacacaagcccagggttctgcagaatgggagggccagcagctatcactgcgtgtgtgagggcaggcagaggaagtcactgtgttttaatagtccagcaccacgggtagagatgttgtggctgactccatccaaggttcaatttctttgtagtaatcatttcagaagttagagcattaacaggctcttgttggggaagaaaggttagtaactccatctcctgagcccttgctaaaaagctcagcttcctgaattctccaggctcaccagattgagagggaagcccaccctgctccttctcccaccgcaaggctgcctttgtctgtaaatgacagggaagtgggtgaggagggaggatggggacagaccttagggggtgggagtgtggctccccctcccccactgtatcacacctatttcacactcagatttatccacataccaggccttgatcacaggaagcccatctgccagccacagggaaggcaaatgccaactggaagccccggtttcttgcaggcgcccaggctgctctgacaggtacagagagacggagacaagcccatctcaccgagagcggcctagctttctgagtttggaccagattgtaagagataagggagaggaaggcttcagatagctatgaagagagctatctgacctccaagtacccttttctttaacaaaaaattagatctggctcttgtcaacattgacctcccacctctccataccccagcgcaaaggcagtaggtggatcccaccagcaaacagttttggattagctcatagttgttgtttttttaaaacaaattagttgccaatatttaaaaatcaggagattttgcatgcacctcagattcctgatttctcctgaaaaatcagaagaccagatcacattggacctgccattctgtgtagcaatggaggccagggctgagcaggggccgtcccctgcccacccccatacagcagggccctgccctccctaccccagctcctcctggcagcatgcaccttacctatctacttgatcaataaacagatcacttcaaagcttctcaaagtatccctctttctttttttctttctttccttccttccttccttccttttctctttctctttcgttctctctctctctctttctctttccctctccccttccttcctgctttttgttgttgctggtgttgttgttgttttttccagaaacgcagtctccctgtgttgcctaggctggtcgggaactggcctcaagcaattcttccgcctcggcctcccgagtagctggaactacaggtgctattccaagatggtgaaaccccgtctctactaaaaaatacaaaaattggtcggggtggctcacgtctgtaatcccagcattgcagaaggctgaggcaggtggatcgcaaggtcaggagtttgagattagcctggccgatatggtgaaactccgtctctactaaaaatacaaaaaaattagccaggcttggtggtgtcgcctgtaatcccagctactagggaggctgaggcaggggaattgcttgaacgagggaggtggaggttgcagtgagccgagatcgcgccattgcactccagcctggacaacagagcaagactgtctaaacaaaagctcaacaaactacctgccatccccaaaactaatctcacctcctaaagcattaacgacccttcctgaccaaatctaaactagcgcccagattttcttcccatatggctcagcccagctccgctgccccacaggtgtcctgtcaggatccgcttcacatttataatacctagcaccccacccccagccccgcccctgccccaccagccacccccactctaccccacccctacccatcacattccgcaccccacccccgccaaacccacatccccaccccacccaacctcacccactcccaccacatccaccacccgcaccccacccccacccaccacacccatgcctacgccactcctgggtgacagcgagccagggcccgggactctagtcccagctctgctgcttacttgtgtgacttcagcctctccatgcctcagtttctccatagggacaatgactacactaacagtgtccaccccggcaccgggagggccgggctcccggcagggcggggaccctctccccaaggcactcccgggtctccaggcctgctcttggggtgccccctcctctcgcggggcgcggcctgggaggcgccccgccccggctccgggcgctcctttacctgggggagcggaggtctacgcggcgcgctcggcgatcagacgcggctgcagcccgggcctggcaggccccgggctccccgcccagctccccagccccgcggagggtcgcgcaggccttggtggcggccccggcgctggccccgccctccgtcccaccttccggctgcgccgggccttccgggaagccacgcgccgggccagctcctggctccgagctgcgcccggccttagggggagccgggggtcgctgctgggcaccccctccccggtcctggcccaccccgccgctgtcaccggggccctggcttgggttgcgggtggcgtaaggagacgaggcgcccggagaagagtcctgggaaccgcaaggccgcgctcccgcaggcccagccctgcctttctcccacgcgcacgcatgatcacatccgggccccgcgcacctgcctccaggaccgcggggacctcccggagacctccctccctttggcctggaggacccctctctccccgcagcctgggcacagaagagagcacaggggcatctggaggtcaagggtgctgcgtcagtatttggtgaatgtgtgggccggagccagatttcctctgttccagagcctgctctggagcctctgggtctgggggttgcaaaaggagaagcaggttgggtgggactcgtaatcccagctgccagtgaggctgaggagggaggattgcttgagcccagcagttcgagcgtgggcaacacagtgacatcccatctctacaaataataataaaaattaggccgggtgggtgagtcatacctgtgacctacagcattttgggaggctgaagcgggaggattgcttgagcccaggagttcgaggctgcagtgaactatgatcccaccactgcacttcaacctgggtgacagagtgagaccgtctcttaaagaaagaaaaaaaaggaaaagaactggctttgctcttaggagtcttggatggggaccaaagctgaggcaaggcagcctcttaggaaggtgcaaagggcatgaggctggggttgcagaactgcctgggaatactactttattgaggcctgtggaaagctgtccctactcttgtcatgcaaggtctggccttgaaccatctcaaatccaaaagtggcttctggggggctctatagagaattaatcctaacaggaaccctgcaaagcaggcatggttgtcactgctatattacagatgggaagctctaaacacaggctgctctgcccaaggccatcctggttagaaagtttcagggcccaaactccagcctcggtctcggtatctcaaagtctccgcctgtgaccagcactctgcctgctttccagggtgccatgggcacccagaggacggacccttttccatttttaaaagaatggaacaaacgctcttaataccaagcttccccaggccttggctgggataaaacaaccccatttattcctgaatcggagcttttgcttgagtttgggtgactttcaagagggaaagtgaactgaggccaggggaactcagcttgctgccttcctggggcctgagtgtggcgctcccgtttctctgcgggcagctccctctggcggcacattgcagaactggcctgcagactcctcccccagagatagtggggaagagggcctgtgtagggaaagatgctgggagtgaaagaagcttcaaagtccaggccctccagagaaggcaagcatgtaagaggttcatgcagcccagcgcggtggctcacacctgtaatcccagcactttgggaggccgaggcgggcagatcacctgaggccaggactttgagaccagcctgggcaacatggtgaaaccccatctccactaaacatggaaaaatgagccagacatggttggtgcaagcctgtagtcccagctactcgggaggttgaggcaggagaaccgcttggacccggcagatggaggttgcagtgagccgagatcgcgccattgcatgcaaatctgcaacccatcagcctcctgggcctcattctgatacgaatgcaggcataacatgaccgcacactctgaaccccagagatggagcacacagtgcctcatgctcctaaaggcaactgcggcctcctgcacagtgagcaaggcgtgccgtggggtctcggtggtggcgcggaaatggcactggcccagcacacagcgatgctttatgctgcttacagtgacctagggaaagttcttccacgtctccgtgcctcagtttcctcatctgggaaatggcaacaagagtagtacttatcctatagggttgttctcaacataaaaggaggtaatatatatgaatctagattattcttgtttacattacagaatgtgaaaatgagcggcttctccaaagtcccatgagcctcatgggcccaaggtagtgggaaatccagttctacccccaccttgacaaaacattctcttgctgatgggcccaacaatgccctagggtgctaggtggtgttcacacggccagccagagtcaaaactcagacggggccagcgttctatgccctcactttctcccaaagctgagtgcaccagctcctaaaacttccatggctccttcaggctaaagccacccacctagaccagggctggatgatccgcaatgtgggccacacccaaaaaccctatagcttcttttgttgtttcttttttttttttttttttttttttttttttgagacggagtctcgctctgtggcccaggtgggagtgcagtggcgcaatctcggctcactgcaagctccgcctcccaggttcacgccattctcctgcctcagcctcccgagtagctgggactacaggcgcccgccaccacgcccggctaatttttttgtatttttagtagagacggggtttcaccgtgttagccaggatggtctcgatctcctgacctcgtgatccgcccgcctcggcctcccaaagtgctgggattacaagcgtgaaccaccgcgcccggcctgttgtttctttttgttgttgctttgagacagagtctcctctgttgcctaggctggagtacagtggtgtaatctcggctcactgcaacccccacctcccgggttcaagcaattctcatgccttagtcacccgagtagctgggattacaggtgtgcaccaccatgcctggttaatttttgtatttttagtagagacagggtttcaccatgttggtaaggctggtctcaaactcccgacctcaggtgatccgcccaccttagcctcccaaagtgttgggattacaggcacgagccactgcacccagcccaaacttctctcttctgattgatagtcatattggattaagagccctccctaataacttcattttaacttgattacatctgcaaagaccctatttccaaataaggtcacattcccagtgatggggttaggacttcaacacatctttatacaattcaacccttaataccaggtgtcttaatctgttttctactgctacaacagaatgccactgactgagtaatttataaagagaagatatttatttgcctcatagttctggaggctggaaattccaagatctaagggccacatctggtgagggccttcttgctacatgataagatggcagaagttatcacataaagagggagcataagagagggaagagggccacccttattcctttatcaagagcccactcctgtgatcacagcattaatccactcatgagggcaaagccctcatgacctcatcactgctgaaaggttctcctagcaatttgggaggccaatgcagatcacctgaggtcaggagtttgagaccagccaggccaacatggcaaaaccccatctctattaaaaataaaaaaattagccgggcatggaggcacatgcctgtaatcccacctactcgggaggctgaggcagaagagtctcttgaactcgggaggtggaggttgcagtgagccaagaaaatgccactgcaccccagcttgggtaacagggtagactccatctcaaaaaaaatatatatatataaaatatatatcgtataatatatataacatatattatatattatataaaatatatataatatataagtttggacaaagatatagaattatataatatataagtttggacaaagatatagaattatataatatataatataatatatcagtatatataattgtactattatataattatatataattatatatattatatatataattatatatatataatttatatatatataaatatatatataaattatatatatatataatatatatatttatatatataatatacatatttatatatatattatatatatttatatatatattatatttatatatatttatatatattatatatatattatatatataatatataaatatatttatataatataaatatatatatttatataatataaatatatatatttatatatatataaaatatatataatatataagtttggacaaagatatagaattatataatatataagtttggacaaagatatagaattatataatatataatataatatatcagtatatataattgtactattatataattatatataattatatatatttatatatattaaattatatatatataattatatatatataaattatatatatatataaattatatataattatattatatattatatatataatataaaaaataaatatataaatatataaatattaaatatataaatatgtatttatatattatatataattatatattatattattatatataattatatataatacaatattatatataatatttaatataatatatatctatctcaccacaacggccattgaatttcaacatgagttttaaaggaaacatgcaaaccctagcacgaagtattcaccagatgccagctgtgattattataatctgagcacgtgcatagtacatacatgtccacccatggcacaataaaaataacagccttgggctgagcatggtggctcatgcctgtaatcccagccctttgggaggccgaggcaggcagatcacgaaatcaagagatcgagaccatcctggtcaacatggtgaaactccgtctcttctaaaaatacaaaaattagctgggcgtgctgtagcgcgcctgtagtctcagctactcgggaggctgaggcaggagaatcgcttaaatctgggaggcggaggttgcagtgtgctgagatggccccactgcactccgcacaccagcctgtgcgacagagcgagacctcgtctcaaaaaaataaaaataacagcctcgggttaagcgcggtggctcactagtgtaattccagcactttgggaggtcacggtgggagaattacttcagaccaggagttcaagaccagcctgggcaacatagcaatacctcatctttacaaaaaatttaaaaattagtcgggcatggtggcatgtgtctgtagacccagctactcaagaggctgaggtggaaggatcgcttgagcccaggagactgaggctgcattgcagtgagctgtgatcgtactgctacacttcgccgggcaacagagtgagatcctgtctcaaaaaaatattaacagcctcgggccatgcctatgtcaagactgttgtgtgcagggaaaccatcctgccacctcccttcggtcttgggagagcttaatcctgaaagggttgtggaaggacaaggtggcttggggactggtaatgatctcttcccaggcttcatcactgttcttttaaataattaattcatcttcttccttggtgtttacatccttcaaatatttgtagatggttatcatgtccctttagtcaccacttagcaccactctgcatatttgctgtcatgttgagtgtgtgttatcatcattgtcattattattattatttcctcccagctccctccctcagtccctcagccaccatcatcactcagtgaatttcctccaggttcccaacctttcaagtaccaggttacccaagatgggacattaaaagtcagtagtgatgacaagccctacttgtcacagagggcttgcaggccctctggttcctcactaattctcatcagtttccccaaagccacagcaaaaaaaaaaaaaaaaagacaaactaagtaaaaacagcatgcttacactgcaaacacagcttccagacaaatcccccagcccctgctcccaaacagataatcctcaattttctcaaatacaaaatcaggatgagaatccctgctctcaacaacctgggattattgtgaggattcaaagaggaataaaaactgaaaggtgctttgtaaactataaaacagggagggtggtactatcagcaatgccttccacataggatgggatttctacaaaatgttccagaggtcaactgttctaaaaagctaaaaattctaagttagaatttacaaatgaactcgatagagccaagattcacccgaaaatctgtctattgaaagaatataaagagatgccctacttaaaaatctactcatagatgttagtattccaaataaagtgtggaactcagagctggaggctgatggggccttggagtttacagatggccctgacgagactttagaaggtcaagctgctataaaagacttaaaaaaaatccaccttgtcttgcatttcagatctcactgaagagttcttctgtgcctggaagacttattttcagtctgagaagaatgatttttcaatggttctgttgaacatgcaattctcacgcaagtatttctataattatcctgtttcagttataatacagtttctggaacaataggacttttattgtattgccatatctgttataatagatgttttattacagaaaattatggtagagtcactattatgattctgaagtttttatttcaaattgctcagaggatgcaaattctttctcccactagttttactttaaggcagctttgaatttggggtgggggtggtttgtcttttcttctattggagctttggtctgtttgaggttttgttctatagcagaatgttctctttcgctccagtgtacataaatgaagtcacccatggtatttgcttgtttgttagcctgtggtgcacacaattttaaaaagaatgtcacctagattgtctctatatatctgcaaaatttctttcattattgctggagaagtctccataaccctggtattaattttttttgagatggagtctcactttgtctcccaggctggagtgcagtggtgcagtctcggctcactgcaacctctgcctcccaggttcaagaaattctcttacctcagcctccctagtagttgggactacaggtgtgtaccaccatgcctggctaactttttattttttatttttttagacgaagcctcgctctgtcacccaggctggagtgcagtgacacaatcttggctcactgcaacctctgcctcccaagctcaagcaatttctggcaaatttttgtatttttagtagggacggggtttcgccatgttgtccaggccggtcttgaacgcctgacatcaagcgatttgccctcaagtgacccacccaccttggcctcccaaagtgctggaattacaggcatgagtcacggcacacggctgacaaactatattttgagaaggtaaatactagtgatcatgaaacactaatactagtgatcatgaaaacagaggagctgaaacttctaggcacattcaggctaggtcacatcctatttcaggtggtagctccaccttgaaaagcagggggctggagattttcttggttaaattagaggctgcagacacccgcagctgctagaggcagagctgggattcaggaatgggcttgctgactccaacagtgaaggtcttcccctccaagagaccccacccgtggggaagggtgaccctcaaatcttggacatcaggtccaactttcggcccagttgacttttccacaaaggaaggatttcagggctctgagaagtcccagaatatctgcccacagcaatctagcatcatcagaacccaccttcacgtgtagccaccgtgtctccatgttcctggtaatgcacgctcccaggctcagagtctggaactgctgatggaggggcgggttctgggccctgcaaagaaccgaggctccgcagtcacagtcttcgattagacagagcccctccagttctcagacgatttcttaggctaccccgaaaatagagagaggaagggacctgcccttgatcacactgtcagtaacacaatcagaacagaaatctagggctcttggccttcaagcctctgttcttcgcttaacacacggctggcagagatggggagacctgagagggccctgagggtgagggcatttgcactgggtgcagagcgcctttggaaggcagggaagtccaggaaggtaaacacacacacacgttgtaaatatggcgaaaatcagagaggaggaaatgtcagggactcctccagcacggaaaacatcctgatagtttggagcgccgggaagagtgggcaccttggaatctgcaaggcattcttttgcgtttcacctgcagtggggtggggtctctggggtctgccctccctcctactctacatgcattacccatcttatagccgggccgtccctgcaaaattccagctgcatgggggaaccacacttctgacttcagaatgaaaccagtgttttgcacacattcattcctcagtccccttgctgggacccttctctgttatgaaagcagagatcccacccgaatagggtgactttggggcgatggattacctttggcaggtcctgtgggtcaggaatttaggggtgcagcgtgggcccacagcatacccagtagccaaggaagaccctcccctacccgaggctcaagcaggcgccaggccccaaaccctcactcctctctggtctaaatccccgccgtaggattttatttttcggtgctgaggtgctttgctggaggagctgccagggggagctgcgcggggcaggcccggggtaccagaggcccttgctttagcggcggccctgcgtgtgccagaggcttgcagagtgatctgagcacgccaagagattgctgtcaagtaagctcctccacaaatctgcagaaacctcaaagattacagcgctcgcacggcaggagcgcagcggcttcccatacgccggcagacaatggggcggaggaaggaaggggacggtggcctggggacccccgcgcccgcagcacgtgcaccgagcctggagcgcccgctttacagatcttgtcgctccacccctaaaacaaaggccccggggccccatctgtgccgggcgcgggggagggcgccgcacttgctgcccgccgcgtgcaaagcgagccagacaaagggctcagccctgcagacgcgagcagtggggaaataattaagcactaaggaaatattgtatgtggatttgagaccaacgggaaacgcgctcccaaacaatgctcgttgtttgcaccgagccgcttttctgctaagtttcatcaagtaatttgcatgccatttcaataaaattaacgaattatggtcgagttttttgttttattgacctaaaataaaaatcttcctttcctttattattgaaataattcgccccccatcccccccggctcccatcctctgggaaggctgcacagcgcgccaaggaaatctgtcctcccagccagaccccagcggcctttctgctgcgctccacagctaactccccggaaaccctgcgtttattctggctgccccctttgactgtggcaataaatagaacttcaaccctctcactttcttatgcctgcttttcttacagtgaaagcaccagatttccgcgtaggagggactcgggggcaacgatgcaattggaaggtaaggggcttctcttaaagctgcatttgcaaagcgagcacactgtttgctaaggttttatattgcatcttttaaaaaagataatgtggggcctggcatcgtggctcacacctgtaatcccagcactttggaaggcctaggagttcaagaccaacctgggtaacatagtgagacctcgtctctacaacagatttaaaaattagccgggtgtggtagcctgtgcctgtagtctcagctacttgggaggctgaggcaggaggatcactcgaacccaggagtttgaggctgcagtgagctatgattgcatcactgccctccagcctaggagacatagcaagaccccatttctttaaaaaaaaaaaaaaagactaagaaatcatcactaattggtattattaaggaacaacatcagtatcactgtagttgttatttattgctgcatatcaaatgcaaaacttagtggcttaagaccaatgtcctctctcacagctcccaagggtcaggaatttgagagtgctgtagctgagcggttctagattgggccctctcttgaggctgtagtcatctgaaggggtgcttgggcctggtgatgtgcttcccagaggaccactttctcatgtggctgggctgttggccatgaggcctgagtgcctcagcatgtggggctctccacaggctgttccaatgtcctcttgatgaggaagctggcatcctccagagggaaggatccaaacaaccaagcagaagccacagcgtcttcatgatctggcttaaaggttgcacaccatcactgcaacacccctacacattcgtccatgtggctgggactgcacagaggcatgaaggctggtaggcatggatcactgggtccaactcagagactggttaccatgagtgattatcattaatatgatttggtagggctgttgcaagtgcctggaggaggagagtattatacagctaaagccatcatttcttgtctttctagtcaatgcaaacaaaagtggtcagttacctttaatggtattcccagacaacaaacatggactcagggccttcccagtgccagctcccccttcagactggggaatagaacagtagccaagagagataaggtccccttctggcatccctgacttttcagagaaagaaaacgtaagtgtatgcatgaacacagcaaccagagctacaatactatcgagacagtgctgccaaatgggaagtacaggccaggtttggtggctcacgcctgtaatcccaccactttgagaagctggggtgggaggatcgcttgaggccaggagttcaagaccagactgggcaacatagagagccgtcactacaaaaataaaaaattagctggatatggtggcgcacatctgtagtcccagctacacaggaggctggggcaggaggatcgcttgagtccaggagctcaaggctgtgatgaggtatgatcgtgccattgcactccagcctggatgacaaagcaatttaaaaaaaaagagggaaagtcagggaggagactaagctctgagtgccaaggttggaggtctgtacaccctggtcctccctaaattgcaaatctgaaatgtcccaggcattgcagatttcctgcaagccaaacctgttagtagaacaacagacaaaaaataagatttttttttttttttttttgagaaggagtctcactctgtcgcccaggctggagtgcgatggctgcgatctcagctcactgcaacctctgcctcccgggttcaagcaattgtcctgcctcagcctcccaagtagctgggattgcaggcacccgccaccatgccagactaatttttcgtatttttaggagagacaggatttcaccatgttggtcaggctggtctcaaactcctgacctcaagtgatccactcgcctctgcctcccaaagtgctgggattacaggcgtgagccactgtgcctgttttgatattgtcacactttcatggaataccaacactcccccttcccagaaggcaggctccacaagggaggaggctgttatgtcttatttatccctgtagctctcatgcccggaatgattggtacataattggtatcactaatgactgtcattaataataattatctaatggctatcagccttgttggtgtccccaagtctttcaggtttaatggacgtcccccttaacattaacaaataaaagtgatttaagccctcagtctacttacagtgaaacatgagaactacagatgaaatcctcagcgccccccaaccaactgaacagaccccctcttggccaaggggaccccagaggaaacttaaccacagagttcccagccatgatgggaagggaggtcagacacaccccgctctacccactcccttttgtggcttaaacacaaatgagcagcattcatgttaaaatagaggtcatggtggtcgcagtggctcacgcctgtagtcccagcactttgggaggctgaggtgggaggatcaactgtggtcaggagttcgagaccagcctggccaacatggtgaaaccacttctctactaaaaatacaaaaattagccgggtgtgtgggtgcctgtaatcccagctactcagggggctaaggcaggagaattgcttgaacctgggaggtggaggttgcagtgagccgagatcacgccactgtactccagcctgggtgatggactgagaccctgtctctaaaaaataaaaataaaatagaggtcataagactggcagaatggactctgtgacagtaagataccaaatcataaccaggacctaagggccatatcagggaagggttaagtcacacacccctacacttaaagaataaactagtttccagctgccgcaaggggtttctttttctctagcagctaaacaagccaatggcttggagataggtaatattaaaacaattgcagttcgcccgctgccagacactaactgaccctcgttccaccagccagaactgcagctttgattggacaagaggctgattcagtaactttctcctgataagagaccactgaccatggcctggttctgcccatttacagaggctgtgcaatgccttcatgtccctgattcaccttttgacgtctacagcccgattgtaatacacttaaatgtgtattctccactccaaggtgaacatgggatgtgtgtaacatgcatgtttgcttatcacacatgtgtatggcctccttccaagaatattcatagctcttcctatatcccgttgaatatgtatacctggccaacccattcagcttgaattcctgtcttatcccctcccacccttcctcaaagtgcctgcctattggcttctactggagactacacttcttagccagtcagggtggctgccttgcaggttgtaactctatatgagaaataaagccctccttttctaaatgatttttaattattttaaatgagtgatttttaagctagcagacaccagcccggaatctctaaaggttgctgagagaggtggtaagagccacctgtgcgtttctcctgatcaggagcctctaaagcctgattcttcagggttcgcctcctcgcctccctcctcagctcctccagccctccctctgttcagtgtgcctggcccaaatgaactgggagctccagaccttctcggggacttccccaaagtctctataacacaaggtgttggtgccacagactttgactgttgggtctacagtggccagtgagggttcaatgtagcggcgtggctcaccaggtgcctggaagggaatattgagacctcctggttcttgagagttacttgggcccagccaggctctcagcatcttacagggtctcctgctactctcttatctgtggaccagcctcttcctggactccttttcccatatcagggacaataaaacactcacccactccaggccacagcttttggggtccagagctctgaactaacaccttatgtttagtgaggtcaaatttttaggcttagtgcccatctttcttctacttagttttattttaaattattttttagaaacagggtctcactgtgtcaccccggctggagtgcagtggtataatcatagctcactgcagcctggaattcctggaatcaagtgatcatcccacctcagcctcctgagtagctgggactacaggtgcatgccaccacacctggctaatttttaaattatttttagagacagagtctccctgtattgcccaggctagtcttgaactcctggcctcctgccttggcctcccgaagtgctgggactacaggcatgagccaccacacccagccccactcttctaagtggagggaaggtttagtctgcccccgtaacgaattatgcaacactctttcccccttagaacatacaagcactctggtcaaagtttctgagattttattttaggagcatttttcattttggctaaacatagacatatatacccacaagactgccggttaaaacaaataaaatatcatcttgaggaaacaagcacatcttgagtaagtttctttcaagatgttttggtgcattctatgctatcactttgcagaacaatttgttgtccatgcggtaactttaggggctgtctgagatggtctgttcctaaaagactgtggatgggagaggtgacagtaaatcctggagagtggagtgaatcccagccattctgtggacaggtgggctgagggagaagttcagagggcactctagagtgatttgcaacgtctcaaacagaaatataacatcttctttcatcctctgcagagtctggagctaaattcacacctttttttccccttccctcacttaaaatcaaattctcgcccttaatacttcctttcagaactgcaccgaaaatgacgatgtcttctcatgcatatgaattatccaaagtgtaggaagatgcgcccccactggagtacgctgaagcctttaacccaagtacatttaatgctgcgaagccccgagtgaggcaaaggtgtctttttattttagaagacatttaggacagttcatgtcactctgcacagatgcactgaaattgattgtggggcaaactataaagagagcttatgctccccaaatctgtttccgagccaggtaggatgatgaattctgaggtgggactgagggggaacggtggcagctctctcccctgcacgcaccggccaactacttccccgtttggacattggcgtgacaccctccttccctgttcatctgtgaaaatgtgcagcgttttcatttaaaacctcctgctccaacatggggccttctgcagaccgcagggacccccaacaattacttgttggaagaacaaatgaagcataaagcatgatactttattttaaacatacaggtggcacaaatttatttccaaagatttaagcacctgatgacttctccttagagaaaaagcaataaaaggagcctcttctgtcacaaatttccacttagcatggtttgtgcagaggcagaatttcaggcttttaccactgagctctggacatgaagcaaagctaacactagagggtgctatagattaggaaatccagggaccatgggcgccggagcgcgttcaagacgctgccctcccgattgtaacctaacaaactgagcgtgtcactttgccagaatttaccccttcaccatttctgctatgatgaaattatccagatatgtttaatttgaaattttaacttagtctgtgattatgtggaatttcaacactggctgtggcccagtgcagtggctcactcacacctgtaatcccagtgctttgggaggccaagtctggtggataatttgtggtcaggagttcgaaaccagcctggccaacatggtgaaaccctgtctctcctaaaaatacagaaattagcctggtgcctgtaatcccagctactcgggaggctgaggcaggagaattgcttgaaccctcaggaggcagaggttgcagtgagccgagatcacgccactgcactccagtcctgtctaaaaaaaaaaaaaaaaaaaaaaaggactgagcccaggtctgtaggatagacactttgtgtttgtatcttaagtactttgcgatctcacccttacaaacctgatactaaattccacttacctacttcagtccttctctgagggaaggtggagtttggaggcaattttaggaagcaggatgaggaaacagggaaggtgacacagtgaaggacaagccaacacaagggtggattaccaaggctggtcccctctacaggcacccagggctcggtcccacgcggactgctgagtagacagaagacctttcagaatcttctgcctctcccccatttgctgagagttccctgggaacggtaacccccgtaccttcgggctgaacatatgtttgcatgctgaatgggctctttctgccatcccatgccacagcattcaggaagccctggggccaaagcaaacagcatgcttgaggcaaggtgctgtgaggcccaaatgagctgaagcttgcacaaaactgctcaccactgccatagctgaatcagcggaggccaggaggatgcgaggcggtgcccgtgattgtctgatcatctccctcttggaccgctgagactcaggcatgccctgcatcaaatccaacctgtcaccaggtcttcaagggggaggcctgcggaaatcctactgtgaatgaaactacagttgctattcatcgtctccctcctgcacctaccactccagatgtccctcactcttggccagcactttggcttgtttaagttgtgtgccaggtgaggtgaccacaccttcccccctgcagtttctgagtctttcctgagctttgtcttggttggcccttggctgctgtgactgcctattttatctaattgcaggttcaagattcaccaagaaggcagggcgcagtggctcacatctgtaatcccagcactttgggaggctgaagcaggcagatcacttcagcccaggagtttgagaccagcctgggcaacagagcaagaccccatctctaaagaaaaataattattcaggtgtggtggcacatgcctgtagtcccagctactcaggaggcggaggtgggaggatcgcttgagcccaggaggttgaggctgcagtgagccgtgattgcaccattgcactctagctgggcaacagagcaaaaccctgtctccaaaaataataagtaaataaataaataagatactaagagacagcccagtgactctcctgagtcccaaacatactcatccatccctcatggagaaacaactctatctccttgcaataatcagaactagtttctcctgccagtttaatcagtactttttttattgcagtaaaatacacacaacataaaatgtgccactttaaccattttattattattattattattattattattattaagacggagtttcactcttgttgcccatgctggagtgcaggggcgcgatcttggctcactgcaacttccactttctgggttcaagcgattctcttgcctcagcctccggagtagctgagattacaggcacacgcagccatgcccagctaatttttgtatttttagtagagacggggtttcaccatattggtcaggctggtctcaaactcctgacctcaggtgatccacccaccccttggcctcccaaagtgctgggattacaggcgtgaaccaccatgcccagcccattttaaccatttttaaatgttcattcagtggcctgagttatatgaacattgctggacaaccattgctactatgtatttccaaaactttttaattgccttaaacagaagccttgtaaccattaagcaacacctccccatcccctctcccctcagcccctagtaatcactagcctactttctctgctactttgtctcttgtagatgtttcaaacaagtagaatgatatgatacttgtccttttgaaactgacttattttacatagtatagtgttttcaaggtccatccatgtggtgcatgtattaaagcttcatgcacttttatggctgaataatgttccattgtatgtacaaggcgtgccacattttgttattcattcacctgttaatggcaacttggcttgtttccacttttgggcccttgtggataatgctgcagtgaacatcagcatggatgtctctgagtcctgctttcagttcttcagggtatatgcctagcagtggagtagctgattctatgttaattctatgtttaattttttgagaaactgccatattgttctccaggctggctgcaccattccacattcccactaaccgtgcacaaagattccaatttcttaccaacacactctcatcaatacatgttatttttagtttatcgtgttttcatttttcttttattaatatatagcaggcattctaatgggtgtggggtggtatctcattttggttttgatctgcattttcctagtgtttagcgatgttgagtatactttcctgtggtcatttgtatattttctttggatgtgtatctgttcaaatcctttactcatttttaattgagttgtctttttgttattgagttgtaggagttccttatatattcttgattttaaaactttatcagatatatgatttgcagatattttctcccattgcatcggttgttttttcagtttcttgataatgtcctttcatgcacaaaagtgtttagttttgatgaattccaatttgtctctttttctttctttgctcatgtttttggtgtcgtatctgagaatccattaccaaatccaaggtcgtgaagatttacctatatgttttcttgtaagagttctgatgtttgtcattgatccatgctgagttaacatttataccgtataatgtaggggctacctcttcattcttttgcatgtagaaactccgttatcctaattgttgctaattgcctctggcccactgacttgagaagcccaagaggaccagggagtatttgtattttcaagttctgtagaattggtgatgttccctggtggaggagtccactctccgctcctcctcccccatcaagaactaagacgtcgaatttgctagagccccacccaaagctgtggacacaggaagcacacatttctcaaggtggtctctgcgagtgatggtgagagcagccgatctcactccccccgccaccccctgggtttccagccccatgtctttctgcttttgggatcatagcaccatgtgtctgctcttggtaaggcacgtacaccacagtttcaaggatagtatcccaattatacagggtgtgggctcacgctttcaccctggcatagccttggcacaggtcatcctgatgttcttgtaggcctgctgcttccagaggaaccttggagccatagcttctttgctgtaaaacagaccccttggcttgaggcagtgttgttcaaatcccctgccaataaatcagagacgaccgtaagtgctctgttggtgatgccagtgaaggcactgttgcaaggaaggaaaatccatatccagagtcggtgttcactctgctaggactcatcgctgtctcatcaatgacagaaggggtctcatataatgaactttgcactgtgactgcctgatctccttgtgaaatggtgccatcttgagggctcattattagtccatgtggttggcaggtagggcattcagtagcggcagcagccaggtcatctctagcaagagggaacttgtgttgggctcatgcctcccttgacttttgccaccatggccacaccattcatggaactatctatttcccctgccgtggggtggctgatgctggctgatgcccagaggatgaaccatcctgtccacccagttgctaggtgcctcctctgcaggagaggctttttggcagaccttaacgtaagtccaatgattggcacgctagtgccatttccataggtcagtagtactgatttttccttttgtctcagacaccaatatggctcggcacagcagttactgatcctgtctctatttgaaattttaatattttgctcatcatggatttttgtattaattttaactctttaaaatattgcattaacatattatgcatcttcatgttattattattcctcttcagcttcccaaagtgctgggattacaggctgagccactgtgcccagctcaaatgcattattttcactgctgatgtgttgctgttgtgtcctcccaatctatggcttaatgggtctcactgtaatcagttccaggaacaaagtcactcactgtcctgtgggtagtctccgagtctctgcgaggacccactgcacggcaggagctagtctcagactgaggtgagttctcggcagcagaaggcaccaccgcactcccaagggctaaaggtttaccctgcacctctcctactgaagcttgcagagggttggcatggcagccttcttcatcataggagactctaagactgctacttttggctcctctgggttgtgcagcttgagtggaagagcagatcctctcacagcctagacctcctggccagccgtttcttgccctagactccactccgagtggcagtctcccaagctgtctaataggcgtatgggagaagtatcagcaagtatgctacttctaatgtcccaggtggtgcacccagcactgtgcctcttccctagtgcagctgaaggaaagctgccactgcctgtgccttcctttacaagggttgtcctggcatgtgtcagaccactgggtcccctaacaaccttgccaatgtgccagtcctctgaatgtttctgggctttagcccctgcccttggcttgcacgtgtcttcttcctaggacatccggggtgcttgtgtcatatgctggtagcataatgtcatcaacagtgcaccagtgtgctgtgcaaactatcccgagacagcctgtatgcatgcaaagtatgctcaaaagtacccaaggccgaggcgtggcagctcatgcctataattccagcactttgggaggctgagactggtggatcacttaagcctaggagtttgagactagcctgagcaaaatagtgagaccctatctcaactgaaaacaaaaaaagaaaaagaaaaagaaattagctaggtgtggtgatatgcgcctgtggtcccagctactgggaggctgaggtgggagaattcattgagccctggaggctgaggctacagtaagctgtgactgcactattgcactccagcctggatgacacagcaagactctgtctcaaaataaataaatttatttattaataccacatcaatcggtatttcccgattttcataattgaactgtggttgtataagagaatgcccgtggccaggcgcagtagtccctgctacttgggggttgagacaggcgaaaccccgtctccactaataatataaaaattagcaggtcatggtggcacatgcctgtaattccagtactcaggaggctgaggcaggagaatcgcttgaacctgggaggtggaggttgcagtgaaccaagtttgtgccactgcactccagcctggacaatagtgtgagactccgtctcaaataaaaataaaaataaaagaagttgcctggcttagttgtgcttactggactcagagccccacatggagtctgctgacctgtcttgggattgaagggtgataggtgagaaggatggagaatttgtaaagggccggcagtctccctgatctgtctcttctaattttgtagtcggactcctcctatttggttcctgggcgaccttcagttcttgaattttagggttccaaacaacaagtgttaagtgaagtttggggccttttaaaaggtgtcagtgcttgaaatttgagacaataataatagctgccatcttacggtgagtttgtcagctctgggttgtgaattttatgtctgtgactgcatctcatctcattgatgtaaaaagtaaaattagttttgccaagtactgccttcagtcattggaggttggatttccctgtttccaactcttagggagtctctactggggccagtgtgtcagcatcaccttggccccttctataccttaatgccctcgctgaagggtaagctgggatccctttggccccacgaagcattaaagccttcatgtcctctcatcaacacaccccattccagggcttctgtgcctccccagcctccatgtcccgtccccggggcctcgagagctgctgatgcttctctacaccccctcagagggctgcagggaactggggtgggtgtgcccctgtctttcctgcccaggctaatccgcctcgcactcccttccagcctcctggcttgggacatttcagtgtcctccacctttataccaaagactgtgcccctgtcactatatccatgtcagcctctaagcccccggctcccaggaccacatgccaggccctctgatgagctccccagccacccttctgtaagggtgtgcaggtcctgagcacagcaggcactcaggctggaataaggtatggggcacctcttcccgacggcaccctcagtctctgcatgtggctctctctactggaatttgggaggccagggcaagcatctcccttaggctcccccgacagcatggggagacctcagccctcccaccagcctgagcggtcccaagctcagccgctagccacaagccccaggtttgctgcccaggcccaagctacccacgggcagtgagaaaggtaccatctcccagaatgggaccctcttgcctgtgtggtcagtgccctttctcctggatacagaccttcctgagcagccaaaacttccttctcgcccgacgggcaaggagacctgaggattaaccgcatgcttagcagcttcctggaggcccccccttggaactggaaatagtcctggataccatgattgaagcaacttcaggctgtactgagcccacgcctggctctggggttgccctcctctgcacctcctgtctggtcacctcttgcttttcctatgctatgcagccaagcaggtgaccaggaaggcctctcacccagaagccacctggctcctgctacccactgtgcacttgttccaggtgcattcccaagggccgacttccttggttcattttgacaaactttgaggttgctcgtcatagcccttaagaatggagacaaacaccctccctcccccattttccaacccccgatgtacacgggcaaaaaacagaagctcagagagggtgaggactttccacagagtcacacagctggtgaagtcgctggtctaagcctttaactagggccaacttgacccttcacctgcctgccttttcccacccctgccctccctacaggtgctgtctgcatgtagaatctttcaggcccagattcaggatgtccagctgagtgtgggaagggtggtgtggtatgggcccagccacatggtagctgaaaggctctggggccagggggtcctagctcccagccccgccccttagagcctcaccagggactcaagtctattgacacaagggccagcacctgtcacgaggtcatcttccctaacatatactttcatttaggggcaaagaacttctctttttgttattttgcattaaaataaccaagattcatccagacgtggtggctcacacctgtaatcccagaactttgggaggctgaggttggaggattgcttgagtccaggagttagagaccagcttgagcaacatagtgagactccatctctacatagaattttaaaaacttccaaagaattaaaaaatatatattagccaggcgtggtagcatgtgcctatagtcccagctattgcgaggctgaggatcacttgagcctgggaggtcgaggctgcagtgagccctgactgcactactgcactttagcctgggagacagagtgagaccctgtctgaaaataatcaagatcaaccctggacagaaaggaattgctagagtaataccctttgacctgaaatgctgtggggtctaaggtgctgccttcccctccgccctgtgtgctagtccttgtatgttaagactcagtagttccccgtatcccagtaaaaaggcaggggtgggatgatgggtacactaaaatcccattccccaccagcacacaatatactcaggtaacaaacatgcgcatgtaccccttgaatctaaactaaattaaattttaaacaaacgcaagggtgtgacctggatggagtggtacagtcatcccctggcaccaagcagcccattagcccagaatggttatctgatcagatgcctgtctcctatggacctatgggagctggacacagggaaggagcctttgatgccgtggaacaaggtggaggaattgtccatgcgaagtggcccctgaagaactggtacgaaggggttggctgcagtggtttgagagtcagggactgggttgggggcctgggcctacaaggctttctaagccccctaggactggggactttgtcctggatgctatgggaggccactgaatggggtgggataaggggcaggaaggatgggtccacaagaaaactgatcagagtgacttttttttttttttttgacacaaaggcttgctctgttgccaagctagagtgcagtggtgcaatctcagctcgctgcaacttctgactccctggttcaagcaattgtcctgcctcagcctcccgagtagctgggactacagttgcgtgccaccacgcctggctaatttttgtattttcagtagagacagagtttcaccatgttggccaggatggactcgatctcttgacgtcatgatccacccacctcagcctcccaaagtgctgggattacagatgtgagccacggcacctggcccagattgacttttaaaagcaggacccagggccgggtgcagtggctcacacctgtaatcccagcagtttgggaggctgaggcgggcagatcacttgaggtcaggagtttgagaccagcctggcaaacatggtgaaaacccgtctctactaaaaatacaaaaattagccgggtgtggtggcgcgtgcctatagtctcagctactcaggaggctgaggcaggagaattgtttgaacccgggaggtggaggctgcagtgagccaaaatcacatcactgcactccagcctgggcgaaagagtgaggcttcatctcaaaaaataaaaataaaaataaaaaatgaaataaaaaattctggccaataaaacaacaacaaaaaagatcctggaacccttctttctccttcttgctccctctcttgccacatgacatgcctgctcctccttccccttctgccacgaatggaagtttcctgaggcctcaccaggagcaggtgctggtgtcacgcttcttgtacagcctgcagaaccgtgaactaaatcaacctcttttctttttaaatcactcagcctccagtatttctttatggcaatacaaaatggactcagacactccttgatctcaaacgtcccagctttcagaacggtgaagcataactgttcattgttcaagccctggctcatggtattttgttatggtggcctgagctaatacaggaggccggctgggggcctggcccttgagagatgggggaggcttagagcacagcggcaggggagtagggaagaagcagacagggtagaagacacattctgtagtgacagacccactcactggttatggtctggagactgggatggaagaaaaaggacctcaggaatgactgccaggtttctgggcttgagctacaggggaggtggagacactatgtcctgggcaaggagttttgttgtggaagttccagctctggagcactccagcctttagaggtctggttaaggagaagcccaagaggtgggaggaagacaggagggtggagagtcactgagactggtgcacagtgtctccagaagcacggagcaccccctttcaatggcaacctggctttgtaggacttttgacacgcttacccccaccggctttccccgcgcctgcatggcctctctaaccatccacatccatggtgagggtccctcccttgcctgccattgctccatccacccagtccccaactcggtagatttgtattgtgtccatcctttgaggctctcctccactcccccagctcctgtctcagagtcccccagcctcttgggtccccctctgtgtcttgtgtaagagctgagtgtgctcttgtctgtttcccaggaggtgagctcctcacgtacaggggtcgcgctgcctcctcctctgactccctggctctgagcgaaggctctggcatctgtagccatgagaggaatgtttgccgagtgaccccatgagcgagtgatgccagcataaaggccagtgcacccaaggctggcccaaaatatcctctggcaaccagagccgccccgccgggggatgcattctgcctttgaaagtagtgagtagcacatccttacaggtacccaagaggagaaggattggacactattcagggtggaaatggatgaggggatccctgcgatgggggagagggtctgactacccatcccctaaggacagtccctggtctggggcctcccagcctgagaacgaggcaggagccaccaccatcggaagctgtcagattcacagtcataattccagagtgtgacacttagttaatctgaaaatatttgctaacctattatgaataacaatatttgcagcttaaaatgcttaccctccatagctccagagtgtgaagatgtgcttctacccagacaaagatgtactcactactatccgagcaaattgacacagggagcttatgagcctaattgttggcatctcaggctgatttgcgtcccctggggccactctgataacttggctaaacaaatacaggaggtgctgtagggacaggctcacagggccagagggctccatggagccggatgacggggaagtatttcaggcctctcaccagaacctcctgctatgctctgaatgtctgtgtcctcccaaaattcatatgttgaaatcctaattccctacgtgagggtattaggaggtggggcctttgaaggtgattaggtcatgagagcagagcccacagtaatggggtgagtgcccttatataaaggaccccaggctggttgtggtggctcatgcctgtaatcccagcactttgggaggctgaggcgggaggatcacttgaggccaggagttcaagaccagcctgagcaacatagcaagacctcatctttaaaaatatatatataaataaataagtaaaaaggatatcagagagctctttgccccttttctgccatgtgaagatacaatatgaagtctgcaatctgtaacctgagagatggggtttcaccatgttggccaggatgatcttgaactcctgacctcaagtgatccacctgtctcgtcctcccaaagtactgagattacaggtgtgagccaccactaaatttctgtttctgataagccactcagtctacggtactttgtcaaaatagcctgaacagactaaggtacccccctcaccccatctcatcacagagtctctggactttttttcttggctgcctatatggttcttagggtcatcttcacagtcagctacggggtgtggccaggccccgtgggtatgtggttaaggtcattggctaacatggatgaccaaggccattgcagttcccagacactgagaggctccacacacttgtggatgggggtctgtctttcctgaggaagggtcaatggccagctcgaggctgtgtccacagataaagatgtttgcacagaatgtggagcccagaggagacaaggatctatcaagggcctcccaggagcttgtgccagaatgtgcaactcaagccagtgttggcatgaaggaaacttggcgtaactgcagagaccacggcttcttcagagcctcacatctcctgtgttggtgccatcgcagctgcacagcccccagccctaacacccaggacacctgaagcaagagccctttcctgtggctccagctgaaatccaggggcccctttctctccctagcccaattcatgccccctctaaacctttgctgtggccagggtttagagggggcattgctggccccacccaagaggcaaggtctgaaagtggagaaagacggattccccaagactagctgggatgctcttacaagaatgacagaaaagagatgctggggctggatgcagtggctcacacctgtaatcccagcattttgggaggccaagatgggtggatcacctgaggtcaggagttcgagaccagcctggtcaacatggtgaaaccccatctctactaaaaatacaaaaattagtcgggtctgatggcaggcgcctgtaatcacagctacttgggaggctgaggcacgagaatcacttgaacccgggaagtggaggttgcagtgagctgagatagtgccactgtactcccactggggcaacagagtgagactccgtcgaagaaagaaaaaaaaaagaaaagaaaaaagaaaaaagagatgctgggcaggagaaaagcctcccttgagggaaaagagaaggaaaggaccaactgccttggcccattcagtgatctggccatgaaaccaggggctggctgaaatgtcattgtccaagaaaaggtgctggctgtgcacagtagctcatacctgtaatctctgcactttgggaggttgaggcaggcagattgcttaagcccaggagtttgagacaagtctgggcaacatagcaagactctgtctctacaaaaaataaaaaaaagtagctgggtgtgatggtgcacacctgttgtctcagctactccaaaggctggggtaggaagatcactcaagcccaggatattgagactgcagtgagctatgattgcaccactgcactccagcctgggcaacagaacaagaccctgactcttaaaaaaaattttttttaaaaaagagaggtgctggtgaccatgatagacagcgattcagagcagagagagaggaggcccaaatagcttagtcctgtccacagtggcagaggaaatgggagaattaaggcaatttcaatgaaaacaacaattttaaaaaaaatgccccacccaatgcttatacctcaattatctagatttgctcaagcaggaattatcagaataacttaggaaaagcttcttttgggagtaaggacaagagggcaatcgtggccaggcacggcagctcatgcctgtaatcctagtactttgggaggctaaggtgggtggatcacttgagatccaatcatttgagatgaggagttcaagaccagcctgggcaatagggtgagacactgtctctactaaaaatacaaacaattctccaggcatggtggcacatgcctgtagttccagctactggggagcctgaggcacgagaatcacttgaatctaagagcctagatggtgccactgcactccagcttgggtgacagagcaagatctgtctcaaacaaacaaacaaacaaaaaaaaccaaaggatgactgacctgtgtcaacatccagagttcccatctcagctatgtgcacaggaagggccagtctttctcctttactctcattcactctacagatgcctaccgggtacctgccaggtgggccaggccctgttctcaccactgctctgaatggtcaccacagagaatggtctccctcctctcagggagcccatgttctgcttggggaaggcagccaacaagatctaaagcgtcgctgagtgacagggacatgtcctgtgaaatgcatggagaggtgatgttgtcattgtgtggacgtcacagagtgcactacacaaacctggatggggttgcctactgcacatctagactgcatggtgtggcctgtggctcctagaccacagacccagacagcacgttactgcgctgaatgccgcaggcagctggaacccagtggttaagtatctgtgtacctaaacaaatctcaacttagaaaaggtacagtaaaaatatagtattatcattgatgggaccactgtcaccactgcacactgcctttgacccaaacattattcggtgcatggccatcgatgatggagattgcgattcgtgtactggagaaaataaagcgaggtgggctgagagtgggaggcccgcagggcagggcactttggatcaggttgtcaggaaatgcctccccgaagagggcgcatttgcaattaaagccaagtgacaagaaaaaactgccatgcacagatctggggtctagagggtggggcaggagggacaacaagagcaaaggcactggggacggaagggcttcatgggcagtgggagccccacgggagccccctaggtctggcttgcaagctctctggccctctgctggacaccccagagcaagccagcccctgcctgggactccctgaacacactgcccccagagaaccacaggcagagggactggctcacctgagttccacaggaaagacagactgtcctgagaacagacactcgctcattttcatcactgttcctcaaacaagtagattttgttttaaagcaaacaaataaacagcgttgtcaagttggtcaagtttgttgtttcttacccaaacttcccctttaaatcttcggcaggacagaggaggaccctgggcttcttgtcaattctctgacttcaaggaagagtctgatcaacccaggctcactcgcaggcttgaaaggggcctctagcgaggccagggtgggagcagagaccgtaacaaggcctttttttgttgttgttttttgaggcagcatctcactccgtcacccaggctcaagtgcagtggcacagtctcggctcactgcaacctccgcctcccaggttcaagagattctcttgcctcagcctcctgagtaggtgggactacaggcccatgccaccacacctggctgatttttgtatttttagtagagacggagtttcaccacgttggccaggctgctctcaatctcctcacctcaagtgatccacccacctcggccccccaaggtcctgggattataggcgtgagccaccgcgcctggccatgtatcttttttgttatttgtaattgtcacttgtctagtgttttggtgcgcacatttacagaacgaagcctgctgaaaagctttaaagtacagcacactaatgattcctgagatataggtataggtctctctctctccccgtttgtctgtctgtctatctatctatctatctatctatctatctatctatcatctatctatctaatctgtcatcgagagagtgattgtagatagaggcacagatacagatacagaaactggaagctattttctgaaaatagagtggcatccaccactgtggtccatggtgatgcagccctgcgggtgggtctggggacattagcaggcagggcaggaagagtctgggagccagggagccttccccagacctctagcatccacccccaggcttttccactgcactgtcgacactgaaggtcaagttatgccccagactcctactgctggaggggcttgggccatattcccagggccagtgaggccaggaagccagtacttccgttagctaagaagtcaccaggcacaggaccccaaggctcaggggcactcgccagtgatggctgcagggaaggtaggagacgcacagcagcaggccactgggccgggctcctataccacctggaggagatgtgacagcctcacttccaggagcctggccctggccagcagcgtctgtggtcctttggcaggcagctagatgtggccactttgcaggtggcctttcatagcacctagaatgcccctgctcactcatctgtgaagcaaggacgccactctcactctgcctgtcttgctgtcactcaacactcaacaggcattgggcacggtggcttacacctgtaatcctggcgctttgggaggccaagtcaggaggatctcttgaggtcaggaggtcaagaccagcctgggcaacgcagtgagacgccatctctaccaaaaaataaaagtaaaattagcctggtgtggtggtgcacacctgtagccccagctgctcaggaggctgaagtgggaggattgcttgagcccagaaggttaaggctgcagtgagctactatcacgccactgcactccagcctggggacacagtccgatcctgtctcaaataaataaattaattaaataaaagaaaaaataggccagacatggggctcatgcttgtaatcccagcactttgggaggctgaggtgagtggatcaggcacccgtcacctgaggcccaggcatgaggcacccatcaccacgcccagctaattttctatttttagtagagatggggtttcaccatgttggtggtgggctacgttcccagggccagaactcctcacctgaggtcatgagttctacaccagcctagcctggggtcagattgcttgagtttgagagagcctgggcaacgtggtcagaccctgtctcaaatttaaaaaaataaaaataaaaaacattcaacatatatgtttggagcacctactatgtgccaggcctcaaggtcatgagaaacaaaggtggatgaatgattcgaagacccgcctctggcctccccagcactgacagggtgggcttatgaaagggcttctagactgctcaccggcctgcacgtgggacacggaacctcctctgggacatggagcctactctgagggcagagattgagcatggtttacagcaggtgtgccaccctccaagccagaacagggcctaatgaaaatcccatgctgaaatatttctgtattttgtaaggaatattcagtgtcacaagaatgtgaggctgtggggtcagatcgtttcatccagcttctggcacaattcagtgttcttgggggagacccgggaggtttaggaatagaaaatggatgggactggctgggcgcagtggctcacacctgtaatctcagcattctgggaggctgaggcaggtgcatcacctgaggtcaggagttcgagaccagcctagccaacatggtgaaaccccaactctactaaaaatagaaaagtagctgggtgtggtgatgggtgcctgtaatcccaactactcaggaggctaaggcaggagaatcacttgaacctgggaggtggaagttgcagtgagctgagattgtgacattgcactccagcctgggctacaagagcaaaactccatttcaaaagaaagaaagaaaggaagaaaggaagaaagaaagaaagaaagaaagaaagaaagaaagaaagaaagaaagaaagaaagaaagaaggaaagaaaaagagagagaaagaaaggaaagaaaagaaagaaaagaaagaagggaagaaagaaagaaagagagagaaagaaagaaagaaaaagaaagaaagaaaaagaaagaaagaaagaaaaaagaaagaaagaaagaaggaaagaaaaagagaaagaaaggaaagaaaagaaagaaaagaaagaagggaagaaagaaagaaagagagagaaagaaagaaagaaaaagaaaagaaagaaagaaagaaagaaagaaagaaagaaagaaagaaagaaagaaagaaagaaaagaaagaaaatggataggactaaaccaacttaaaggtctttttggagtccaaagattctccaagtctcacccttctttccctgtccagaaaggctgattccagccaggtgtggtggctcatgcctgtaatcccagcactttgggaggctaaggtgggaggattgcttgagcccaggagttgaagaccaacctgggcaacatagggataccccatctctatgatttaaaagataaaaataaaaatgctggttcctgatggcccaaccttgcctgttcacaccagctctgggcctgtcccccatggaccaagctctggattccttgaaggccaccagtctccagcctccagtccagggtcactgttcctaagggcgtgcccagcctgaccagatcctcatgtgagggaggcacagggacaatgttccaggatgggcccttatgcctgctggtgatgtcagtgacaagcccagggctcagcctgcctctgtgtccttctccaggtgggtttgggcagcctggaccagagggtgcaatgagcttgtctgaccccatctgtgccgggagggcgggggcctgcattgtaagtctggccgtgggggccctcagtttctgtcctgtatttttacattctaattatttcatatatggccttctgatggactcatttactgggaagctaaagatacccttcaatgtctaaaaataaacctgaactgctaaaaattcagcatttctctccctcgcttccaccagctgggcctgtctgcttttactccaacaccatcaggagctacaaacaagatttacaaaagccagcaagtttacacgggcctgaatagcagattctcttttatcttcaatttgacaaaacattttggggttgttattattgaggctttcttttcttttctttctttctgtcctttgtttccttccttccttcctttttctttctttcttttctttctttctttctttctttcttcctcttcctcttctttcttcctttttctttctttctctttcttttctttctttcctttcttcttccctttattctttttttctatcacttcttctgctcctttagtctagtatttaggaaaactttcgtccaaatgcaagcttccaagatgttctccctctggtctgccacacctccttttcttacttcaattattttaagacactctcccaatttctatgagtaccatgcggatggcctgaaggccagttaagaataaacctgctaaaccaataaattacattcactcttatttccagaggaacgcttttacataaatatctgccatagaaataaatcagataaattaataagaactccctcctctcctcaaaccaaacagtgaacagtaatggttatcagaccagttaaaagaataaacctattaaataaataaatttgctctacgccaatttatgtcaccaatgtacttaaggggaaaccttttaaaagagtagatttacagtgcacacacagatctccactgggtatgtgtaattatgcataagaaagacattacttttaaagtggatgaatgggcgatacttttttgatttactgctagaaacagaaaaatggtaatggcatgaaataagcgtttgcaaacccatttcggaagacaggaaatgcttgatttacctagggcacccatcaggttctgtatttcagatcaaagtagataaatggtaaggcaaatggatatttggggggaaatctatagcctttctgtcaactctgcaagttaaatgtttggaataaaaacgcagagagtgtctatatgcaaggaagaagtcatgatttattagcaatcgggcaaatggaagtgggcagtgcttacctggaaggtgaggatttctcagatacgagggctgtgggctgtgtccacaattcctgatgtttttagctatgaaatctggtggccagctggtccttctcacccaccccaagccacctaacagctgccctgaatgctgttcttgttctaacctcttacttgcactttattttattttatatttatttttattttttgagacagagtctcgctctgtcgcccaggctagagtgcaatggagtgatctcggctcactacaacctctgcctcccaggttcaagcaattctcttgcctcagcctcccaagtagctgggattacaggcatctgccaccacacctagctaatttttttttatttttagtagagacggagtttcaccatgttggccaggctggtctcaaactcctgacctcaagtgatctgcctgtctcagcttcccaaagtgttgggattacaggtgtgagccactgcacccagcctcttacttgcactttaaaaccctgcctgcgacaccacccatcaaaagaaaaagatggacgctatttaaggtggttggacattgttttcatggaggctacatggagctacgggccctagtcaatgtcatgtctgagcctttgttgaacaccaactgtacattaacctgtgttggttatggctcacagtgttctacaagatcttcatacaagtcagtatcttccaaagcagagagtaatgtctacacacaaatttacccagtattccaggagccacatctacactcaaatagagaattgaaagtggagcccaaggctgggcacagtggctcacgcccgtaatcccagcactttgagagcctgaggcgggtggatcacttgaggtcaggagttcgagaccagcctggccaatacggtgaaacccattctctactaaaaatacaaaaattagccaggcgtggtggtgtgcgcctgtagctccagctacttgggaggctgaggcagaagaatcacttgaacccaggaagcagaggttgcagtgagctgagatcacaccactgaactccagcctgggtgacagagtgagactctgtctaaaaaaaacacaaaacaaaacaaacaaacaaaacaaagacagtggatcacaaatcttgcgttcctaaatgcaaccctcccttcctgaattaactaagccatcttagcaactatatcctctgtgggttttacctgtttggacacagggacatgtgcccagagtcaaagttaaacaggttgggatcatggccccaatttttttttttttttttgagacagggtctcaccctgtcactcaggctggagtgcagcggcacgatctccgcttactgcaatccccacctcccgggctcaagcaatcctcctgcctcagcctcctgagtagctaggactacaggcgtgcaccacatgcccagctatatgggccagatttccatctcagctctgttagtctctagctagatcacactttctctccaagtctcagtttccacatctcccaaattggtataatcatctctgagcctgtgatggttaaatgagataatatatttaaaaaacttaacaatgttgcacagtcagtaaatagtgacaattaccgtgttgcttttttttttcatcatcagggagaaatgcaaagagtgctgaccaggtgacgggctaggtgcccagccctgtgctaggtgctctgaggactgagagatggaaaccacagggctctgcctcagggaaattacatttgctcttgtacacgagaaataggaaacactaggtggtatccattattgccacagcagctcagcgagaagggatgtgagttgagccttgacttgcaaggagagttaggataggcagagagaggacattccaggtgtaggaactgcataggcagagggctgggggcagcctctgggaggtggaagggagaagtgtctctggaggtgaagatgtggggagggtcagagagctacggccagaacacgaggagccccggggactgcccctcagaaggtgctctcataacagccaacatgtggcccactctgccaccattaggagcctagcttgtccaactggtccagcctccactgagcagtcaggtcctgctggcctctctttctactttcccagccccagggaccactctctgtgcgaaggttttccctgatggggccagaccaaccccgcctttcacccgtatgactcagtcatcaggcagatacccccaccactgctcagggtcatgaacacccatgcccggctctggctggctcgactggcttgctcatgcccacataggagggcatgccgggagcatgaaggaattcaggagttggcagatttacacagtcagaacgcactaatatcttttgaccagcttaagaataaatatggcccaacaaattgtcgtttttatgggtatttacagccaaggcactttgtaaacccaagaactagtatttcccagaggaaatctggctctcgattcttgataaattattggaaagtcagaccagccccagctcaggggtttctctctcttattagtggttccagaggtgtggcctgagccagaattaggcttgtctgggctgaagtctctgaagggggtgagcagcccccaggcacctaatgatgataccaatagtaataatcacaagcatgtgcctagcaattacttggtcccgggacactctttcaaacccttcccaagtattaactcatttaatcatcaaaacagccttacagcgtaggtactattattattcccattttatagatgaggaaacggaggcacagaggattccagtaagattcaggaatttctccagggtaaaagggaatccaacccgggtaatactcggaatgctttctgttgcaagtttaaaagctcaaatgaaactaacatttaagcaaaaacaacaatgtattagctcatgcacataaaaagtgcacgggggtagcggggaggggggcaggagctcctccacctgtgtcatcagtttcctaatatttcccagttcctgatcctttgctcctcggtcatcctcacaaggtgctcctttctcgcaggggacccagactttaaaacgcaacccatgcaaatgaagcaagaaggcagaagtcaagcccctggactcggctgttttcattggtcagattagatcacatgcactctagccatgacccactcagagaggccagagaatgccgtttgctgattggctgagcgtgggagcgaggaccccgctttgttcaaggctgggctggacctggcactgtgctccacctgcgaagtccccctccctgggtcaaaggacccagagtgcagtcaccaccccaggggcctgccaccctcctggcagttcagttaccctccagtgcagggatgctgtgcctcttccccaggtcagagaccaacagtaggccctgcttcagtttcctcatcctctagaatcaaggaggacccacgactgcctccagttcacccttgaggcttctggggctttcctgaggctgagttgccctcagcggccagactacctgcagggagtttgcaggcgctggggcccgagtttgcaggtgcggggcccagggtcctccctcagtttcacacctgcctggccctgggaccttgcaccaagaagtcatttccatggcagaatgcatcttacatcaacgtgtaccgggttttacttcttgtattctctcaaatctgatactgtcaaacatctgctttacaaatcatgacacactgtgtcactcaagcccagttgccacccggggcagggagagtcaagacaagtgcagcagccaagaggagacagcagtggcgaggctgtgtccccagatcaagctttgcctgcaggcggcttagcggatttgatgagaaacagtcctaggctccacattctgccggttcactgtgtcccagtcatgaggtccagatgcttcaggcactgggtcccccaagcccaccggtgtgtgtctttataatctctgctggacagccctgcagcgcactgcccgccatgctggctgcacagaacaggcatctccatccctcttcagtgttgctcaagagaataacattccaacacaaacatccaaactcaacaaacatacttttttgacagcttgaacatttttttaaaaagccaacaaatgttgcatcaaagcaaagccctctccccactgtgctcacagtgtggggactccccctgtcgctggtggaggccatgggagcctcaggcctctgagtccctcccctcccgttggcagcccccacgggcctgagtcctggggggatgacacagagtagggaaggtcccaatgctggagctctccctgctgcaagtgagaggcagagatggctgggttgggggcaagggctcatcaggatcctgggatgggtactgaagtgacccaggtgacatccacaggtccgggggactgactggatgtgggggatgagggtggaatcaagatgctgcctgggaccaggcatggtggttcacacctctaacccaagcactttgggaggctgaggtgggagggttgcttgaggccaggagttcgaggctagcctgggcaacatggggagatcacatctgtacaagaaatataaaaattagccgggcagcatgcccttgtagtcccagttactccacaggcagaggcaggagggttgcttgagcctggaatgtcgaggctgcagtgagccatcatcataccactgcactccagcttatgtcacaaagtaagacactgactcaaaaaattaagaattagacaggtgcagtggctcatgcctataataccaacactttgggagctgagatgggaggatccatcacttgaggccaggagttcgagaccagcctggtcaacatagtgagacacccccatctctaataataataataattcttaaaaattaaaaattaggctgggtgcggtggctcacacctgtaatcctagtactttggaaggctgaggtgggcggatcacttgaggtcaggagttcgagactaacctggccaacatggtgaaacccccccatctctactaaaaatacaaaaattatctgggtgtagtagtgtgtgcctgtaatcccagctacttgggaggctgaggcaggagaatcgcttgaacctgggaggcggagcttgcagtgagctgagatcgcgacaccgcactccagcctgggggacaagaggaaaactctgtctcaaaaaggaaaaaaaattaaaaatcaaataaaggatgctgcttgggttctggggacagaaacatgacaggagtgaattcacaagaagagggcccaatccctcctgctgctgaggacacatggagggcccaccccatgttcaggataggctgaggtcctaccagaggcaccgggatgtgctgagcagctcccgatggtggggctccctctctgaacacctggaaggacattcctcacctgggtcctgaacctggaactggcttcaggggattcagagactccatcaagaaggcctgaaggtgtgcactccactccatacttcctgctctcatctcaccagcaaggcccagaactctgagcgggcctcccgggctgctcagctatcagtaaaggagttagttcccggtgcccatgtgctctgtaccccactgcataggggagagggcaggcgccaggcatccttccatccttgtccttgatgtcactttaacaccatgggaaccttgacatccttcacacatccttctatagacagtgctggggcttcagctgtgtttgggggagcacagagaggagacagggtgtgtctgtttgtttgtttttgagacagagtctcgctctgtcgcccaggctggagtgcagtggcacgatctcagctgggatctgcctcccaggttctaccaattctcccgcgtcagcctctcaagtagctgggattacaggtgcccaccaccacgcccagatttttgtattttcagtagagatggggtttcaccatgttggccaggctagtcttgaactcctgacctcaggtgatccacccgcctcggcctcccaaagtactgggattacaggcatgagccgccatgcctggcctaccagattttaaaataatgattctgaccaggcacggtggcttatgcttgtaatcccagcactttggaagaccgaagcgggcagatcacttgaggtcaagagtttgagaccagcttggccaaaatggtgaaaccccgtttctactaaaaatacaaaaaattagccaggcgtagtgatgtgcatctgtaatctcagctctcaggagactgaggcaggagaatcacttgaacccaggaggtagaggttgtggtgagccgagatcatgccactgcactccaggactggggtcggagcaagactccgtctcaaaaaaatgaataaataaaataaaataaaataatgaatttgaaatccaaggcaggggtgaccatataattgctcatccaaaccaggacacttccaagggcgaaagggcaacaggcatgagccagaatgctccagggcaaaccataatgcatgttcattctgtcccaaggtgacttgtgagggttccttttggcttaagtgtcattataaagtcacagctttgagcatatttcctttgtttcagttcgttgtagccattcttcttactaatatttaaattgtgccatctttggcctgtaggaaaatcaacactttgaatcacctatcctcatcctaagaccgtgaagtcacagtcctgatgcgctactcttttctgagtgcatgtgcgcacctcttggaactgttaaaataagcagcgttcatccttgcccttccaaagtgtcctgggcaccggtggaggccatgcagtgcctgggggacgtgctgaaggagccaggggcatcagtaaagacaggagaccacttagagatggcccaggggactgcaaagaccccatgggcagtcaggaaggaggaagccatttacgctggtacctggcaggctgctggcgggggatgcacttgtgctgtgtttggaagctctttgaactgatcaaagctgggccacaccacgagggagctggatgcccccacgggctccctggagctatgggtatgcatgtagacagggcagccatccagcagccttcctcaggccagcccctccccacaagggaatgtgacaaccgcccccccgcacagcctgggcccccttcgtgaccacctgctgggtacctggcaccccagaatgccctgttctaatggccctggacggtgtacccctaggtcagtggttctgaaagcaggggaggcgattttgcaccctggaagacatttggcaaggtctggagacatttctggtttttacagcagggggtacaagctaaggaggctgctgaatagcctacgatgcacaggatggcctcataataaacagcgatggggcccaaaatgtcaatggggctgaggttgaaaagccctgccctaggccccaggggtggcagaggggctgtgtgtgtgggaggtagggacagagcctggacacgcagcctgcggtgtcctcccacataaggggcaattctgggtagtgtgtggaaggcaagtggagaggccagggctgctgtgttccacactggaactcccagagcctgagatttccaaaattaaacctggccttctaggtctttttgaagttatattggttagggcaggggaaaagaacatattttatttaagcatttgttggcttgatttgtaactgttagatacgtagatataggttatgtgggctgagcgtggtggctcacacctgtaatcctagcactttgggaggccgaggcaggagaattgcttaagctcacaagtttgagaccagtttgggcaatacagcaaagccctgtctctacaaaaaatacaaaaattagccgggcatgatggcactcgtctgtggtcccagctacttgggaggctgaggcgggagaatcgcttgagcctgggaggtgaaggttgcagtgagctgagattataccattgcactccagcctgggtgacagagtgagaccctgtgtcaaatttttttaaaaaggatatgtgggtcaggtgtggtggctcatgcctgtaatcccagcactttgggaggctgagacaggcagatcacttgaggtcaggagtttgagaccagcctggccaacatggcaaaaccttgtctctactaataatacaaaaattagctgagtgtggtggtgcacacctgtaatcccagctactgcggaggctgaggcaggagaatcgcttgaacccaggaggcagaggttgcagtgagccgagatggcaccactacactccagcttgggcgacagagtgagactctttcaaaaaaaaaaaaaatgtggcctctgcttatcgctttgcctcaggtggggacctaggaaacactcgtgcacaatctgtgctcagacagagacccaggagggaggcatggaggctgcaaggagcccatgagtcctgcaggaaggggcctggctgggatggttgttagattccacccaggcattccccactcatgcagatatctgcagaaccccagctgtgtgcaggcaactggctgagtgccggggatgctcaccctctaagacaagaggacaagaaaccaccaatgatgaaagagacagtggtgtgctacgagatccccaggctggggctcagggctctggggcaaatactccatggagttcccggctgccttcttcctgggtccttaccttgggtcatgtgggtcttcacacgtcccctccccccgaccaccacacttgtgcctgcagttgaattctccttttcagagcatctgggcactgccaggaccaccctagggaggggtgtccactggaatctgagtccagagccaccatgcagggacctctgagatcaccaatgcacccatttcacagattagaaaactgagacatctcaacttgtacaaggccatgcagggagggatggtagggtctggctagtgggttaaccagctcccatggcactctgccacctgccagatgcccttcccaccgggctgctcccgggacttcggtggggagggctttcacacatgtcagcattcttgaatcccagaggtctcctcctggttctgatgtactggactaaagaagaggccaggtgcagcagctcacactgtaatctcagcactttgggaggtcaaggtaggaggatggcttgagcccaggagtttgagaccagcttggtcaacatagtgaaacctcacctctccaaaaaataaaaaaaaaattagccaggtgtggtggtgcgtgcctgcagttccatctactcgggaggctgagcttgagcccaggaggtcaaggctgcagcgagctgagatcaggccactgcacccaccccagcctgggcaacagagcgtgaccctgtcttaaaaaaacaaaaaaagttgccattgtggtccccctttctccagcctggcctgtgctgtgtgagggatggccctaaccctcagagggaatggaaacttcgttcctcggtgggcagcgctggtaaccatgagtaagaggaggaagtgtccgggcctgacagggtccagggcccagctctcctgcccaagggcaagactggctgcgtggccgccactggccagcagagggcgcggcctgaggcgcccaaggagggcagcaggaggcaggcggcggggctgtcccgctccgagagcggcgggaagcgccagccaggccggccctcccttccctccggacagcccggaaccccgccacacacctatggctgatgggtgctgtcacttctgtttgctatgctttctgccatcactattgttatgttaaactcccctgactaggtctccactttctgtcccattttgcacattttgcattttgttttgttttgttttgtttatttgagacggagtctcgctctgtcgcccaggctggagtgcagtggcgcgatctgggctccctgcaacctccacctgccggattcaagtgatcctcctgcctcagcctccctagtagctgggattacaggttacccctgcccagctaatttttgtatttttggtagagacggggtttccctatgttggccaagctggtctcgaactcctgggtccttaccttgggtcacctgggtcttcacacgcccccaccccccgaccaccacacttgtgcctgcagttgaattctccttttcagagcacctgggcactgccaggaccatcctaggaaggggtgtccactggaatctgagtccagagccaccatgcagggacctctgaaatcaccaatgcacccatttcacagattaggaaactgagacatcttaacttgtacagctaatttttgtatttttggtagagacggggtttcgctatgttggccaagctggtctcgaactcctggcctcacttgatctgggccccgccccccctcctcggcctcccaaagtgctgggattacaggtgtaagccactttgtaaaaataaaaattagatccctcacacagagtccagggagggagagttccgtgggctgggagctgagaggtggggagatgggctctctgcacccacacttccctgctgtgtggccccaggcaggttacttcatctctctgtgccttggtttcacctcctcctgtaagatgcggcactgggactgcctctcaggagagtcccgcagagcagtctggggaggtgcttggcatggctgccggcacctgctcaccgtcatcacacggggacttagtcttaagaaaaggggactggaggtcgggcacggtggctcacacctataatcccagcactttgggaggcggaggcaggtggatcacctgaggtcaggagtttgagaccaacctggccaacatggtgaaacctgtctctcctaaaaatacaaaaattagctgggtgtggtggtgcatgcctgtaatcccagctactcaggaggctgaagctgtagaatcgcttgaacccaggaggcagaggttgcaatgagccgagatccagctactgcacttcaggctgggcaacagaccgagactctatctcaaggaaaaaaaaaaaaagaaagaaagaaaagaaaggaaaaaagaaaaggggattggaagcttacagccggaaggggaggcacaggctgggtgaagtgggccaggtgtcaccaggagacagggcaagggcttcagagcgggagatggggctgcgcttcagaaccctgggctctcttgggcagtgggggcctcacaccacaatccccagcactggccccaaacaggcggcttctatttctttctgcttttttagagaaggaaaactcatcctgcttcagtatgcagcagccaataaaaacacgttaatctttaacgtgttagcaaaacagcctccaatttgaatatcggctcttcctcccatctgtggcagtttgcacagatttttttttagagtggcagaatgcctcatctatgcaccagccggtggcaggcgccattcactgccacagagcctcccccagggccgtgaagggcccccatcccagaccatggcatggagtcccggcagaggggctcatctaagctctaccttagcacaagagggccccagatttgaggattttgcagatcagtaaaattacacccaaaccaactgggaaggaacatagggataccagctcatgattttgcccaggaaagccatttgagagaaaaaatagatggtcatccaagaacctcttcaattcactggagaaataaaattttgacatcaaaagggggaggcagacagaatgaaagaataacaggtcttcaaactgagcaaatttagggagacctaccgtgttgactttatttttatcatttggacgtttaaaataaccctgggggggtcaggcatggtggctcacacctgtagtccccacactttgggaggccaaggtgggaggatcacttgaggccaggagttcaagaccagcctgagcaacatagcaagaccccccccccccgtctctaaaagaaatttttatttattcatttttaattaatttattttattattagttgtttttttctggagacacagtttcaccctgtcgcccaggctggagttcaatggcatcatctcagctcactgcaacctccttctcccgggttcaaataattcttgtgcctcagcctcatgagtagctgggattacaggtgcccgccaccacgcctggctaatttttgtatttttagtagagatggggttggccaggctggtcttgaactcctggcctcagatgatctgcctgcctcagcctcccaaagtgctgggattacaggcgtgagccaccgtgcctggcctctaaaagaaatttttagattaaaaaaagaagaagaagaagaaagccctggggaatctgcagacctacccaagggggacagtgagtttagtatgctaggagtgcccagctagatccccagcccgagctattctgggctcgcctgcccccagcctgctgccccctcaagagaaccgtgaccagaaacttagtccttgggaaatatgcgctactgcagaacttgtcaaatggcaaagaatcaaggaaggaataaatagcaatattttataagttttaaaatgctattttaacacaaataccagagcaactatagcataaatcaacagagacacccaaaagtatgtttgtacaagaaatgtaataagctggtatgaaaaacagtgtcaactggtacagatggcagaaaaagccaatattcaaatgtatgctgttttactaacacattaaagatcaacattttggtacctgctgctcacgatagcaggattaaaaaaacacacaacacacacatatcctcacgcgtgatattctaacccagagaatgcaagattcttaaagaaattgtcaagcactttctatacttcatctggtggttttaaagcttccgtggttcagaggaaaatttgcatctgaaaatgcggcttttcccctagctgcctgatgttggagaaaattagaaaagcaggatgagaaaatatcagggttgtagtccttagaagtctccttccagattagtaatgggaacagaattatcccaagtgaatgactctggtggtgcctctcctctctgagtacaggacaggctatttttgtttgtttgtttgtttgtttgtttgtttttgagacagagtttcactctgtcacccaggctggagttcagtggcgcgatcttggctcaccgcaacctctgcctgtcaggttcaagcgattctcctgcctcagccacctgagtagctgagattacaggcgtgcgccaccacacctgcctaattttgtatttttttagtggagacgggatttcaccatgttggccaggctggtctcaaactcccgacctcaagtgatccacccatttcggcctcccaaagtgctaagattacacgcatgaaccatcatgccctgccagcacgggctatttttaagatgctttcaggcattgcagctctgggggcccaaaagagccctctgaggtgtgcaggccagggagcactacccgtacactacaaatgggcaaactgaggctcagacgtggtgtacagctgaccagagatcacagggcctaaaggaagcgtgatgggcgtgcagaccaggcacacaattgagcaaaaagcccccaggaaactctcaactgcctcttgtggtgtcacctcgtaagcccatgggcctgggaattgggcagcccgagttccaatcttcactcccaccaggcccgaccttaggcaagtgacctcacctctgagcccctactgagacacaagatcgacaaaaacctccccacagcgctggcatgaggatcgaaggagatgcagtgggtgagcgtggccagtgtgcatggcaactgtgatgtcatgctctgtccagaacagagacagccagccgcagatgctttacttggcttacctagtgtttttaaaagtcttttgatttgagatgaagtcccattctgttgcccaggctggagggcagaggcaagatctcggctcactgcaacctccagtttctgtctcaaataaacaaaacaaaacaaaatgcaaaatgtgcaaaatgggacagaaagtggagacctgcctcagcctcccaagtagctggaattacaggcacgcgccaccacacctggctaatttttgtatttttagtagagatagggtttcacaatgttgtccaggctggtctcaaactcctgacctcaagtgattcacccgcctcagcctcccaaagtgctgggataacaggcgtgagccaccacgccagcctttgtaaagtcttgattaaagccgggcatggtggcccatgcctgtcatcccagcaccttgggaggcaggaggattccttgagcccaagagtttgagatcagcctaggcaacagagtgaggccccatctctacaaaaaataaacaatattagctgggcgtggtggcacacacctgtagtcctagctacttgggaactgaagtgggaggattgcttgagcccaggagtttgaggctgcagtgagctatgatcatgccagtgcaccccagcctgggtgacagagatcctgtctctaaaaaaagtaagatacccatgcaaggaagtagtatgtggcagtgaagaagagtggggtacacctatctgtacaacgtaactgttgggctggaagagaatgccatgcacgttccaacaccttatttttgttttttaggaaagccaccccacaaagtcatactccaatcacatgggcagtggctcacaaccaggagcaattctgccccccagggcacatgtgacaatgtctggagacatttttgattgtcacacccaggtagggggtgctagttgtgtgtctggtgggtaagaagccagggctgtggctgaacgtcctgtaatcatgggatggcccccacaacacagagaagtccagccccatggccaggcgcgatggctcacacgtgtaatcccagcactttgggaggccgaggcaggtggatcacctgaggtcaggggtttgagaccagcctggccaatatggtgaaaccccatctctattaataatacaaaaattagccaggtatgttggcgggcacctgtaatcccagctactcaggaggctgaggcaggagaatcacttgaacccgggaggcgaaggttgcagtgagctgagatcatgccattgtactccagcctgggtgaaaagagcgaaactcagtctcctcaaaaaaaaaaaaaaaacacacacacagagaagtccagccccaaatgctaaccgtgccaaggctgagaaaccttgctccaaatgcaggacaatatctggaaggcaacaagtccagttgatgacagaggctacctctgcggagggtactgggtgatgctgatcaaagagaactttaaacccatgggtaatgtctttactttctggaagaatacatttgtgtgctgttgaattggtaaaatcaccaaggatagaaggaaggagagagggtcagagtggaccactgtagacttggccctgccccacatcttcagggcagcagagggtttgggaggggtgggagccccagggctcatgtagtcactgctgtcctcacacacccgcctggagggtccctcctccctgcagtgacactccctggagtctctgtgactgctctcacagacaccggcagcagattaggttttcacctttccctaatgaatgtgacttttagcaactgtgccgagtgtttttttaaaacagcctctttcaccaaagcatcattaccagcaaatttgttacagcttccagaccaactccatcaaatcacctgcagcccatggtttctccttctccttttcctcctcctccttcttccttcttctttttttgagacaaagtttcactcttgttgcccagtctggagtgcaatggcgcaatctcagctcactgcaacctctgccctctgctgcctcccaggttcaagcaattctcctgcctcacgtagctgggatgcccagctaactttttgtgtttttagtagagatgggatttcaccatgttggccaggctggtcttgaactcctgacctcaggtgatccaccctcctaggcctcccaaagtgctgggattacaggcgtgagccaccatgcctggcctgcacctccatcttcacgggcctggacagaattctccaattaactgagacctggtgacatttgtggtactatgcgatgctcacagcacagatgcacgctccctcttctgattccagcaggcaccaagacccaggcccagggagggccagtatgcgtcagcattgcctgtgcaccctggtgacacctggacctccttctaccaaacaaagacactgcagtaaggtggaagcctcctttgacccctctccaagagacgaccactatcacccagtatgagtaatcactattgcccagcccaggtagctggggtcactaccagacttgtatcctaaattttatacagatgatagatagatagatagatagatagatagatagatagatagatagatagacagacagatagatagacagatgatagatagataattgatagaggtagatgctggatatgatagattataggtagaaagagacggataggtggatagctgattgataaataagagatatgatagataaatagattataaatagagattatttagagagatggatagacagatgactgatggatagaggcatagatacataatacatttacagccacacacattttactgtcgtctggggctttggtgcccccatacctggtactgaatcacacatgttcttccttttcttgccttttcccccaaggcgctcactggagctctttctttgcccattacattctactaataccctcatgtcctaaagcaaggaggcagcagggatgggggctgacgtggcctcccgtactcaccagacatggctgtgtcagccagcagtggggacaccccttggccataattcagctgcccagaggggatgactttccgggatccacacgggtgctgaaggggctggtggagatgacagctggctgatcccaaggacaagcagggactgcactgggacttaaactcttaggggtgtttccggttgttcgtggtgcacaattccaccacgagcagccttgtccttgcttccttgggaagctgcgtctccaggtgggagctctctgagccacctggagcagtcacaatcagagaccagacctatttatttacttatgtttttgagacagggtcttgctctgttgctcaggctggagtgcagtggtgtgatcatagctcactgcagcctcgctctcctgagccaagggatcatcctttctcagcctcccaagtagctgggactacaggtgtgcaccaccatacctggctatatctttttttgtaaagatgaggtttcgctgtgttgcccaggctggtcttgaactcccgcctcagcctccaacgtgctgggattataggtgtgagccaccacgcccagactaactggatcttctttgagcctcccccaccctgtggggagggcagcctggggattataattcataaatgacagaatcgggtcctgggcccagatgaacctttcctgaggtcccctggtgagtgagtgaccaaagagctggccctgatgctctgggaaaacgcctggggccaaggacagcctctgagcagcagccgggccctcctttccaccacagtttccagccagagaccctgcatgcttctgcgcatggccacacccgacccagtgggccctttcactgcccaaggccgatgccgcccatccgtccaccacccgtgtcacactcactggacacataattcctgagtccctacaatgcacaggtgctgttctaggcaatggggagagagcagtgaatgaaatagtctggatccctgaatccagggagctggacttctaggtgcagggaggccaatgggtcctatgaagacagcaaaacaagtgacgtgatgcacagggaggggagagaaaggcttagtggagagtgacgcctctgcacatggagaagagagcagtcatgtacacatctggaggaagggagttccaggcagggaacagcatgtggaaaggcctggagtcaggaagtgctcagctgggaatggcctgaaaggccagtggctgaggtgccctgagggagaggaccatcccgaggagcatcctgagctctcccaggcttgggaaaatctcccttcctctccctgctctgttattccaattccccaggacgccagaaactcagacacctttgtgcaagggcctccctgagcaggagcccggccggaaagtgtcagggtgacagtgactcccagtgccgcctcttcagggccatcctgtggcctcctccagctggacccacgaagcccacttcaccctcagtctccagaagtgtccaagctctgggggctccacttggcccagagaggtctggccccactcctcacccccaccaatcttctctgggcccctttgacagaatatggggccactgctctgaaaacacaacagtgacaacagaaagtctgtgatcagggccccaaactgctgcccccaaagtggccttgaccagaccacttacatgaccattcctaaggagcggggtggctggtgggtgagccaggtgttgtgctgggtcccacctctgccaccaactccctgtgcaccctcaagccagccacctccctctccagcctcagtttcctcctgggtatggggaaggacataacaatattaacaccccccagggtgcacttgtgagctccttagggcaaatccagaatcccaggcccccgtgctctacacaaaccatctctgagacaagggagggcctgcttcataccctgtttcactccccaccaaaaatccccttgactcctctggatttaaattcctcccccaggagctcaaaccgagtcaaggctgcaaataatctgctttatttatttatttatttatttttgagacggagtctcactctgtcacccaggcaggagggccgtggtgtgatctcagctcactgcaacctccgcctcccaggtttcagcgattctcctgcctcagcctcctgaacagctgggatacaggcgtgtgccaccacctccagctaatttttttttgtaattttagtagagatggagttttgccatgttggccaggcttgtctcgaactcctgacctcaggtattctgcctgccttagcctcccaaagtgctgggattacagccttgcaccaccatacctggctaatttttgtgtttttagtagagacagggtttccccatgttgaccaggctgatctcgaactgacctcaagtgatccgcccgccttggcctcccaaagtactgggattacaggaatgagccaccatgcccggcctaagaaggcgaaatttggacccacacaggcaccagggctgtgcacgcagagagcaggccatgtgaggacaaggtgagcaggtggttgctggagcctaggacagtggcctcgggggaaagggaacctgctggcgccttgatgctggacctccagcctccagcttctgctgttcaatctacacaacccccatggacacatacaccagccccaacactgacttcatgtacacacccccacacacactgaccccagactcccactgacccttacacatgccccccacacccatgccctgccttattttaacctggagtgcaacggcacgatctcgccttactgcaacctccccctccagggttcaagtgattctcctacctcagcctcccgagtagctaggattataggcatgcgccaccacgcccggctaattttgtatttttagtggagacagggtttctccatgttggtcaggctggtctcgaactcccgacctcaggtgatccacctgcctcagcctcccaaagtgttgagattacgggtgtgagccactgcgccctgccacagtccatattcttgattatttatagttggatcaattcccttgtcacaacttaatcaatgtatcgaatatgccatcattcgtcaaataggaaccaagctaagatcccttcaagtaatcaaccgtgatttgttatcctgcagggttgctcataccaagagtgcagttcatgaccacgcttcctgcacacgtttcgctgaaggagtggttccatggtggatgtggctatttagattaaaacaaacacccagttagtaccatcaccacgggcacaagattgtatgactgcttttcaaaaagcactagtgatgtggttatagtcaataatggtttgtatcactttttggcttttttttgaaacaaggtcttgctctgttgcccaggctggagtgcagtggtgtgatcatagctcactgcaacctcaacttcctgcgctcaagcgatcctcctgtctcagcctcccaagtggctgtgactacaggtgtgtgcccactcgcctagctaatttatttttattttttgtagagacgaggtctcactatgttgtccaggttggtctcaaactcctgggctcaagcaattctcccacctcagcctcttgagtagctgggactacaggcgcacaccaccatgcctggctttttatttttatttttagtttttgtagggatctcaccatgttgaccaggttggtctccgactcttgggctcaagtggtcctcccgccttggcctcccaagttgcagcaattacaaggcgtgatcccctgtgccttgccaattttccattttagtggatcctgctcacttgggtttctatggcagtcatagcttcactcagttaagattgaggcatgccctgcctcctacctggaccccatggaaggcctccgggatgagacttgtgggttgaagtgtgtcctccagaaagacatatggaagtcctgacccccagtacctgtgactgtggccttatgtggaaatagcgtctttgcagatgtaatcaagatgcagtggggtcatacttgattagggtgctttctaaatccaatgaccggtggattggattgaggggaattatagttcgatcaactcctatggagagggggatttggttagagacacagagacacgcaaacagggaagaaggccttgtgaagacagaggcagaaagtggaatgacgcagctacagcagaggaaggccagggatccccggagccaccagaagctggaggaggagaggagggattcctccctggagcctccagggggagcacgaccctgccggcaccttgatttcgggctcagcctccagaagcatgggagaacaaatatctgctgttttaaagccaccacgtctgtgacaatttgttacggtgaccacaggaaaataatccagggactgcatctagaatttaccatgtgcctcatgccactatcactggcacaggctgaagcctttctcctttttcctctggagaagaccatcttctcctccagtagtctaagcagttctcagcccagggattccagcaagtgtctcaaagccacacactcggagagacgacggccacatgacctggctcagcaggtggctctgctgcctttcacaggagtttgcctctctgttcagggtgccacacagggacagccttggggcagacactctgctgtttattattattattattattgagacatagtctcactctatcacccaggctagagggcagtggcatgatctcggctcactgcaacctccgcctcctgggttcaagcaagtctcctgcctcagcctcccgaggagctgggattacaggtgtgcaccaccacgtccactaatttttgtatttttagcagagacggggttttgccatgttggccaggctagtctcgaactcctggcctcaagtgatccacccgcctcagcctcctaaagtgctgagattacaggagtgagccactgtgccgagcctagctgtttattattattacattttttaagagataggatcttgctatgctgctcagactggtctcaaactcctgggctcaagtgatcctcctaccttggcctcccaaagtgctggcataacaggcatgagccaccgtgcccaggcagccttgctaagcacaccttgcactcctgctgcactactcctgtgtgaggccatggagacatctgctacattgtagatactattggatacttttcaagtatcacacagcctacaatttccaacagtgcactccattcagctcccatgggacggatgagtgtcacagggcagctccacacgcagatcagggagagggtggatatcacccccatcttcctgtggctctgagaaaaggggtgggtgcccggcgtcagggcagctgacttcacccaggaggggccacctgcccagttactcgggcctccacttccctgcactcagggcactttgttggaagagggcttgtctggccatgaatggcctgaaagctgcgagaatggcttaacacacctgaagaagggacatgtatatgctgggggctggcactctcccacattagctcttttgcaccattgtcatggggatcttggggctcagagaggaaagtgacctgcatgagctcatgcagaggcatgtggcaggaccatcgcttgaacctggcactggagggccctgggctcagcacctcgggcacctagagtgagggcatccccaaggtccatgtgacccagagcacggctccggccactccctcccggaaatggatcggtgaacagagaggctgaggacctcttgcaatgctgcccagactgcatggagaagcccgtggagacatctgctacgttgtagatactactggacatttttctttttttttcttttcttttttttttttttttgagatggagtctcgctctgtcacccaggctagagtgcagtggagcgatctcggctcactgcaagctctgcttcccgggttcacgccattctcctgcctcagcctcccgagtagctgggactacaggcgcccgccaccacacccggctaatttttttttttgtatttttagtagagatggggtttcaccgtgttagccaggatggtctcgatctcctgacctcgtgatccacccatctcggcctcccaaagtgctgggattacaggcgtaagccaccgcacccggcctactactggacatttttcaagtatcacacagcctataatttccaacagtgcattccattcagctcccatggggcggatgggtgtcacagggcagccccacatgcagatcatggagagggtggatatcatcccatcttcctgtggctctgagaagcttcagaagcctcagaagcaccccctgtagcgccagagagctcagacagcttgagggcctgcagcccagccagcccctgccccacaggccaggctccagcctggcccttgcaggggtgtgctgtttccaatgggtgccatgctgtgcacatccacggggcaggagggaaagctgggggttgccatgggctgcctgggttggaggggagctgggattctatggtcaccctctttcacatcttctgacgcatcctctctctggaccctcaggcagtccctgtcctcagataagccccgctcactgagacggtgatgcttaactcaggtatgtgtctaatgacagggtcttgcagaagggaccagcctgagggactaggactgcctcacctttgcaagtcctcaattgtccaaggctggcctcctggaatgggaaggaagcaaggtcccccgaggcattcatacccttatttctcacaaaaaaaaaagtcaagtctcttgttccatcgggtgccctctgggaccaagtgactgtctcaggggcagggtgagacagtttaaatgatcatggcctctgcctgacccatgtggctgaagtgagggaggggtggcttccccaagcatccatatgtgtggggggtgctgtttccagaaggacggtgggggtcccaggccgagcttaggagttcactgcagcctcaagaggaagggcttggggaggtggcatttgcatgggctttgaagaataggcaccacctgcatgcacagagagagaggagcaccatagcgagaaggaatggtgcagacacaggccctgcggtacttttgggtagggggtgtaacagagtgcggctgctgtgtggggagtgtgctctggggttcagaacaccagaaccatgtccctgccagctggcaaggtgccctcaggaaaaggtgcccttctggcctgctacagtccccaaaaggtacacagtatggtaaatggagcacagaatggcttatggccagacgctcttgtgcagtgcacaacatgcacaactgtgtgtagtggcctgaccaggatatcaacactggactgggaagacatggcgcctcctctctgggctgaatagtgtgtgtgtgtgtgtgtgtgtgtgtgtgtgtgtgtgtgtgtgtatgtgtgtgtacaccccacagtgcttcactgggatccagcctccagcagcaacaagacacaaatggaacaagggtgactgcccccagctgacaggtgagaggttgagagccagcagccagctctgcaagcctgctgcacgctcaggagcgagcactcctccaagcaggcacctcccagagcaacaggaagcaattcatcagcagctgaggccctgctcccaggccctgcagcctgtggggactctgcagcccaatggacaggcctccgatccccccacccctagcccacaaagaggccagaggcagcgccacgcgccaattacaggagccaattaattcacacttaacaggggtattttcttttactgcgcagaaccgaggggcataaaaccctgattcgtcttctgtggctgggtttgctctctgcgtgctcatatcctttaatcactcctgccacagaccaggggccaaaccctcgccagcgaggggagccacgcgggcgattccccattaacaatctggtggggaggccacgccggctgtgctgtttacagttccgtttcccctcggctgctcccagaagtttccataaaaacagatgtaaggtaatcaaagacttcccagccccgggcctctctgctcctgaaggcttccatggagccggctccctctgctggggtttgtgcttccaaaagactcttaaagcagccctaaaatctctccccagacaggcagactcttctctggcagactctgcaatcatttgtcaagtattttatggtcaataataatagtaataacacctttgctgagcttggtgcctttttcaatgactctcagagccatgccgtgagatcccggtggcatcgcaatggctgatgacaggtgtcttattcccattttgcagatggaaaggagaaggcagtttggggaagaaaccagcctcagcaccatctcccctgggtctaacattccaggagaaaggtgggcactgtccggctccttggtggcaggcctgctgctggccttgtccctctcttcttattcactgggcctctgtccagggccaaggaacctgaagcccagtgttgggggtagggacgtggccagaacaccaggtggtatggctgggcacggtggctcactcctgtaatcctagcacgttgtgaggccgaggtggagcatcacttgagcccaggagtctgaggctgcagtgagctatgatcgtgcaactgtactctagcctgggccatagagtgagaccctgtctctaaacaaataaataaataggctgggtgtggtggctcacgcctataatcccagcactttgggaggccgaggcaggcggatcacctgaggtcaggagttcgagaccagcctggccaacatggtgaaatcccgcctctagtaaaaatacaaaaattagccgggtatggtggtgggtgcctgtaatctcacctgcttgggaggctgaggcaggagaatcacttgaacccaggaggcggaggttgcagtgagccgagatcatgccacttcactccagcctgagcgaccgagtgactccgtctcaaaaataaacaaacaggatagacagcgtaaaccctgatgaacactagaatttcagacaatcctactgccctgaaggctgggcccaacagacacatttcacagatggaaatcttgggaagggccaaagcaagaacccctggccaccccctggaagacctaagccttaaagcccctggcccataccctctgcacctcaccacattgatgtcagcctaagctgacatcagtggatgaaaaagtgatgaaaaagtgacttttaggctgggcgcggtgggtcatgcctgtaatctcagcactttgggaggctgaggtgcatggatcaccagaggtcagaagttcgagactagcctggccaacaaggtgaaaccctgtctctagtaaaaatgcaaaatttagccgggtgtggtggtgtgcacctgtaatcccagctactcgagaggctgagacaggagaatcactagaacctcagaggtggaggctgcagtgagccatgaaatgcaccactgccctccagcgtgggcgacagagtgagactctgtctcaaaagaaaatttttaaaaaggactttaaaatcaaacagcctagattgcacatgtgtgatattggtgggtctccagcccctgcctccatcctgagaagcatcctttttggggaatttcctgatgggtagagtcttggcaggagggcgatcccccttgcctccctctcactgccctttcacacgacaaagaccagggtgggctccaacctgactctgccactgcctggtctaccacatggcaggggtgagagcagggcccagccaatccgatgcctgcttccagggctgcaggtcttaagccagagatgccaggaggaagggaacctctcctgggaggttgggtttctctggtttatcataactcttgaggctcagagaggaaagtgacctgtgtgagctcacacagaggcatgtggcagggccatcgcttgaagctggcactggaaggccctggactcagcacctcgggcacctacagcgagggcatcacgaatgtccatgtgacccagagcacggctccagccactccctcctggaggcaaaacagagaacagagaggctgagtaccccttggctgcaaggtgtccctgtctcagaagcatcaggggcagccccaaacccccacccccgagttggctcagtcagctccaggacagatctcagaggtcctcactctgcagctcagccagcccttgcctgatgggccccgcgccagtccagcccttgcaaagggaaagccggaacatattttagtgtgagccccttgttgagatgagggctgaccacaggccctgggaattcctgagaagattcctctgggctctttccaatgggaagccctttttgtttgagatggctggagttagttcttgtcacctgcaaccaaaacccagactggcatgacttcaggatcagctgtgcccaggatgatcgtggttaacatgtcagcagcatctgctacacgctagatgccctccacattccttagttagttcccacaagagccctggtattatgtctcccactgcacagccaaggttattgaggcacagagaggttaagaaatgtgtccagtgtcacacagctagcaactccagccatctgtccccagagcctccatacttgaggagtaagctggtcttgcttgagagagcactgtggtttcttggatctaagagtggaagtgggatggaagctctgggtgtgtgctttatggggaggtgcatgaagtgaacccctctgctatgggggtgtgtgggccttggaggaatcctggtcccgggtgaggcaggagtgtgtcttgcttctaggaccactccaggcagggcctccctggatgccgcaagtgcagtgggtctgccctggcccaggccctcatcacagctgagaaagctctgcagggtcactgtgggtgctagaacaggcagctggaatgctgcagtgggggaaacagggaccacaggggtgagctccagttttccactgcttttttcaggggccaactggtgagtccaaggaggagaagccagtgagcagaggggcttcccccagtcccagccaaagcagctcccctgggcctgctttacctcctcaacttccacagaggatcccatttgagcaaaggactctccttagctggcaggaggttaagtctgcagtggctgatggcatctctaccaccactcagggaccacctgccagagaaggaagccacagcagaggagaacagagaccaagaaaggacctgtcaatactatttaagcccctggatccagccaggactgaagtccctggacttgctgatagcaagaaccaatcacttcctaatgttatttcagttgcacttgagctggttgattcatgtttctcttgtttgtctctgaatgggtcttgaggaacatgggtctcataccagaataagttccagcttcccctgtcttaaagagtctgctatggccgggtgcagtggctcacgcctgtaatcccagcactttgggaggctgaggcaggcgtatagcctgaggtcaggagttccagaccaccctggccaacatggtgaaatcccttctctactaaacatacagaaaattagccaggcatggcggctcaggcctgtaattccacctactcaggaagctaaggcaggagaatcacttgaatttaggaggtggaggttgcagtgagctgagcctgggcgacagagtgagactccatctaaaaaaaaaaagaaaaaaaaaaaaaagagctgggagtggtggctcacgcctgtaatcccagcactttgggaggccaagatgggtggatcacctgaggtcgggagtttgagaccagcctgaccaacatggcgaaaccccatctctaataaaaatacaaaaattagccgggcgtggtggggtgcatctgtaatcccagctactcaggagactgaggcaggagaatcgcttgaatccaggaggcggagattgcagtgagccgagagcgcgccactacactccagcctgggcgacagagcgagatttcgtctcaaaaaaaaaagaaaaagaaaaagaagaaagtctgctgctatcatactagacagagaaattccaacacctctggaggggctgcccttccttagtccgattaggagaagaaatggcagctggcactcaaccaccacactcccctgaggctactccaggggcagatgtcaaggaccagaggccaccggttctgcgaggggcagggtggagggtgtgggtggaggtatgaaccaccatgaatctcagaactctgcagtcggggccgcggcagcaccactcttgttctcccagcctgggggtcctctcccaccgcagcacctcctcctgttgttctccacccagcagcctgggggagctgccaacagaagccaaccccatctctccttgctcagaaccagccagcagcttctcgtgcaccttaggtgtgtgtgcctcggccccagcctggcctctccactctcccctctgccctcagctccagcctctctggccttttctctcattgtaggacaagcctggcttgctctgcccaaaacttgcagtgcacgagggctgctggcccctcttcttcctccaggctcagccccaaagtcacctcccccagaccagcccttcctctccctttgcagcaacaacgacctctccctttattacctgcttttccccactggaagggaagacctgggccgggcatagtgggtcatgcccataatcccaacactttgggaggccgagatgggcagatcacctgaggtcaggagtttgagaccagcctagccaacatggtgaaaccccatctctagtaaaaatacaaaaattatccaggtgtggtggtgggtgcctgtaatcccacctactcaagaggctgaggcaggagaatcacttgaacccaggaggcagaggttgcagtgagccaagattgtgctactgcactccagcctgagcgacagagagagactccatcttaaaaaaaaaaaaaagaaaaaagctgggtatggtgaggagcacctatagttccagctactcaaaaggctgaagcaggaggatcacttgagcccaggagtttgaggctgcagtgagctatgatggtgccagtccactccagccttggtgaaagagtgagaccaaagagagagaaagaaagagagagaaagagaagaccttagcactgctatgaccctggtctgtggaagaggatcctatacagtgtccactcaacaaacacttgtggaatgaatgaatgagggagtgaaggaatgaatgaatgaataataatgggcatggcctctaatgtcttgccaatgaattccctcccctcctggccacccacacctcatctccaccacacaaaactcaccctcttcatccttcttccagaaaatgtccagcacccatgatcgggggcctttcttacttccccaaagtgctctctgctcacgccagaaatcatcccaggaggaccagccccagcccgtcctggctgccccaagtgatgccgggctccagcaggtgctgttccaaggagcggtggcccagcagaatggtgggtttgttgtttttttgtttttttttttttcatatgagggaaaaattagccttccttaccagacaagaatgacaatttacagaaaactatgccttgaattcataatctgtaatgagcggaaatggtattccatagtaatccatcccaactgactcgctattgtacacgcacctgctaacattttttaagctgggactttatggaaaggacattttgattgcttctgaagtttgctgagcaattccccctctctctcaggcatacggtctttgtgctggaaatttccctcgtggctccatgcgcggactggcagacgggcacgtgggcccacacgcgggcagcacacacgcagccgcagccccctcattggcatggctctagtgggggcctctgcaggtgccgggctacagagatggaagcggggagagtggaatcacagttggcacctgtgccgagcttgcctgaggagctgcacactgcggtgcctggcggaatcggagatgctttccagcactggagggcagggacggagcacgggaccgggaaggacaagggcttgggttgggtcgcccctggggccattggggcctggcttgtggcacccgagcaccaggatgtgggaaggctgggtgtgcaaggacaggtctcacgcccaccccctcaaacgcctgggttttgctcatacggaagtcactctaggccccaattggcagccgccccactcagtccccagctcgggcctccagcccagcactgacacaaacaggtggtggacagcttgctctgcatggcccctacagactgagagccccctgaggcaggaccaaggctgccaacgtgcgcctgggccttgcccagctctggcatgcagtaggtgaaggcagtgcctccagtcggagccagggtcctggtggaggctctgcctccaggcagtgggtccggcacactgatactcagcccctgcagcctgtggctccccagggcatgttctcgtggcctcacagacactgaggttcagagatcacggagccgtgagtctttctttccactgcaggacctgttgtggtccacgccatcaggaaagtggtagtcagggcagtctataacccagcaacgacacggggatacgagaagctgggcacgtgacgtccactgaggctgtctctgtgggaacgagtatttaggaacattcaaagtggcaagcagtagggtggtgactcaagaagctgtggaggccgggcgcggtggctcaagtctgtaatcccagcactttgggaggccgaggcgggcagatcatctgaggtcaggagttcaagcccggcctggtcaacatggtgaaacctcgtctctactaaaaatataaaaatcagccgggcgtggtggcaggcacctgtaatcccagctactcaggaggctgaggcacgagaattgcttgaacccaggaggcagagtttgcagtgagtcgagatcacgccaatgcactccagcctgggtgatagagtgagattcagtctcaaaaaaaaaaaaaaaaaaaaaaaaaaaaagaagaagctgtgaaactccaggccacaattacagtaacaaaaagaatgggggtattctcgtatggaggaagcgccagaaaatgttattcctgaaaaagaaagtaagcgttaaataaagttaggtgtgtgtgcgcatacacacaatgtgaccccactttttgttttgagagagtctcactctgtggcccaggctgaagtgcagtgaggcgatcacagctcactgtaaactccatctcgactccagcaatcctcccacctcagcctcttaagtgactgggactacaggtatgtgccaccacacctggctaatttttaaattgtttgaagaaaaaaagagaacaaaagaaaataataataataataataaaataaattatttaaagagacaaagtctccctatgttgcccaaactggtcttgaactcctgggctcaagtgatcctcctgccttggcctcccaaagtgctgggattacaggcaggagccaccatgcctaacccccacttattttttagaatcttatgaaacgacaccatatgtcatgattaggtgcatccacatgtgtgtgagtacacacacacgtccatccacatacaaacatgtaagatatgtggaggacgccatggcagggagcaacgcacactatccacacatcctcctctgggggcgagaggtgggtctggagctggcaataaagtagcgcttgggccttatctgtcatgttggaattcttcttcttataatgaggatgtattcatgcatgcttctgtaattaaaaactaataatccttttaaaagaaaggaaatgctaggaggctggcttctgccctcacgtacctgatcacagtgatatgggacggtccactcaacccggaccttcatgaaatcctcctgattatttctgttcgtacactccttcattcattcgacaggtgccatccgcctgtcattcattcattcagcaaggactcactgaacacctgctcaggctccggctgcagccatgaacacgacagacaaggtccctgtcccaggagttcacattcgtgtgtgtgtgtgtgtgcaggcgcgcatgtgtgtgtgcacgtgtgtgtctgtgtgtgtatctgtgtgtgtctgtatgtgcatctgtgtgtgtctgtatgtgtgtgtgtgtctgtatgtgtgcacatgtgtgtctgtgtgtgtatctgtgtgtccatatgtgtttctgtgtgtgtctgtctgtgtgtctctgtgtgtgtgtctgtgtgtgtgggtcttccatggccccacaggactcctggagagagaagagaggaacattgggcagtggctgtccttcacccttgggctgaaggtgtggggagaagaggggactgtaaataggctgcccctgagtgtgcagaaatcacatattggccagaagatgtaatgacaggggtcttcaggcccagctcaaatgccccctcttcttgggagctctgcctagaacccccactccagccactggccacacgggaccctcagccgagcttcccagcacaataatgttctgctagtagctccaggttggactcacagactggcaaccggcaggccatgagcaggctactgagatattttgccatgtttgcctggtgggttacctagcccacttcacttcctgccagcacttgggtttgtaggccccgcttcatagtacacctggatgtgcatttgtctgattccccacccctaatcttgcttgctgtgtcacagtcactcagggccagtctattcccagtaggtggctggatgggtggctggatgaatggataaatgggtgggtgggaggatggatagatggatgaatgagtggtagatagattgatgggtgtgtggacagacagaaagatggatagatgggcaggtgggtggataggtggatgggtggatgggtggaaggatggatgaatggatgggtggatggatgagtggatcattgggtgggaggatgaatggatggatgaatgggtgggtgggtaaatggacagatgggtggataaatgagtggatgggtgggtgtgggtgggttgttgagtgaatggattggtgagtgggtggatggatagatgggtggatgtttggatggatggatgggtagatgagtgaatggatggatggatggaagggtgggtagatggatggatggatggatggatggatggatggacggatggatagatgaatgaatggatgggtggatggaagtgtgggtagatgggtggataggtgggtgggtgggtgaatgggtggatagatggattggtgggtggatgggtgagtgattagatggatggatggacagatgaaccaaataaaatagagggaataaactgttactcaggtgttaagcccctatgcaccaggaatcttgaggatgcagggagatgatgagaaagagttggagtgggggacatctccttctctttattaataagaagaatatgttataagctgaatgagccaacagatagttgctgtgcacctatgtgtgtcccgcaccgtaagtggatgtggaagaccataagagaaggaggaaaagataaataaagagaacacagcagggaaaggggaggagaaagaaaaggcaaagcccaaggctgttgagacaggatggtggagctgagggtagccaccagcagcctggaagggcagctgaagaggagagtggctgcaggagggagggcagggcctggggacactccgcccttcccacaaccacctgcagcccctctgctttggagaactaagtcttgggatgcccaaccaggagtgagtcattttttgtctctcggggacagcctgtgtcacccaaaggcccagaatctggggtagagacacgggtctcaatgtcaaggggatcaccaaccctgttggaacttcccccggcctagtaccagccccctaaacctgtgagccatgacaattcttctcaaagatagctcaaatacccacccctggggagggtcctgaagctcatgaatttacccattatttactgggcctccctggtgtgggtgctatgccaagggctgggatacagaaggaacggcaatctgccccttggagctgactgtgccatgggtgtgggaggctgggagggggacaattaaacaagcggggaagataacagctggtctccgtgctaggaagaaaatgaaactagggatatggtgagatcattggagggcagcatctcagtgggggtcagggaaagctgcctggaggaggtggcatctaagctgaggcctgaagggacctaggtgtgaagcttgcaattctgccttccccggggtaggtggggcccactcaaggcttcccactcccttgggtcctcagatctgtccatggacactgcccacaggccaggctcggcaatggggaggtgggcaggggaaaagcacaggtacctgcagggcaaacagggccagggagtaggctccccagagtcagccctgctaaggtggtgaacagctgtgcacatccagcagagggtgctcttggccgcttgggaaaatgctggaggccttcctggaggaggtgatgccagaactgggtgaagaggaagaggatgtggtttgcagagcctggagtttaagtcccaggaggaagaaggagcagtgggagatggggctggagaaggctcagggccaaatcaccaagggctggacatgctttcttttttgttgtttgtttgattgtttgtttgtttctgagacagagtctcactctgtcgcccaggctggaatgcagtggcacgatctcagctcactgcaacctccgcctcccgggttcaagcgattctcctgcctcagcctcctgagtagctaggattacaggcatgcaccaccacgcccagctaaatttttttatttttagtagagatggggtttcaccatgttggcaaggctggtctcaaactcctgacttcatgatccacccgcctcggcctctcaaagtgctgggattacaggtgtgagccactgcaaccagcctgttttttgttttttttgagtaggatgtgatccgcttatgttttaggaagacccctcttggctgctgcagcaagaatggacagtgctgagacaaggaaggaggtgggataagagcaaggcatcaggaccctcctatgagaccagcttgggcaacatggtgagaccttgctacaaaaaataaaaattggctggatgtggtggtgtgcgcctttagtcccagctgctcaggaggctgaggtgggaggatcgcttcagcccaaaaggtagaagctgcagtgagccatgacagtgcagccttgtctcaaaaaataataataataaagattgcaaagggagaaataggaaagatacgatttttttttttattttaagcccagaataattctgaccaaatcaataaagaggactcgggtcatgccccccaggagaaccctgtgtatttgctagcatcagaagtcatggaccagatcacctggacctcagagcaacaggacactaagtcagtgtctgagggagggtggatatacgccatggcatccagaagagaggagggaggacagctccctggaggaggtggcatttgagctggccctaaatctaatgttgacagaagaatgtggacagatgcacacgtcaggaaagacaacagcagaagaaaggggaggaggtgagagtccccagagtcatctggctcccaagaagcacagggtgggtgcaggggtgggttagggactcgggatcctgccagggtaaacatctgccctctctagcctcacctggtcacagggagcaaacactcaaaccccgcagccctggagcagcccaggaaggcagcctagctctgaatcaggcgttgtgcagagagaaagggtttgactgcggtctgaacaagctctgagtctgcaacagccccagcctccttgggccagtggagcccttggccttccaggctgggcccaccggctgcttcagcctggcctggccgcttccagggacacgaggtcccccatggcattggcacctccttggtaaatagcagatgggcagcaaagccccaagtgggaaatagctctaggaatggaggcttctgtgggtcctttgctcttggaaacacctccttcctgccaccttccccagtgccacacgtggcaccttgcagggccagccaggaagtctcagcacccagttaggccagcccagcagccctggcccagtgtccagcactagctttttgagcaacttttacctctctgaggacttagtttccccaacttaacagactgccctggtgcctcctggggatgtttttggacactgagtaaaatggtgatagaagactacagggacagccgggtacagtggctcacacatgtaatcccagtactttggggggctgaggtgggaggattgcttccacccaggagttcaagatgagcctggacaacatagaaagacccattctctacaaaaaaataaaataaaatgattagtcagggacagtggtgtgtgtgccattcatgtcattcaggagactgaggcaggaggatgacaagctcaggagtttgaggctgcaatgagctgtgaacgcaccactgcactccagcctgggtgatagagtgagaccctgtttcaaaaaagaaaaaagcaagtaaggacctgacaacaacctgaccagctgcacgttacaaagggcagatacaaagataagaaacgagggccaactacggcagcatttgcatccttctccatggtctggggccaggggaggcacagacctgtgggggtgaagctgcagaggggagggccagctgggctcaggtgtaagactccattaggcgaaactgaaaagaactgcaacaggccaggtgcagtggctcacgcctgtaatcccagcactttgggaggctgaggtgggtggattacctgaggtcaggagttcaagaccagcctggccaacatggcgaaaccccgtctctactaaaaatacaaaaattagccaggcatggtggcacatgcctgtaatcccagctacttgggaggctgaggcaagagaatcacttgcacccaggaggtggaggttgcagtgagccgagatcgcgccattgcactccagcctggacaacaaaaaaaaagaagtaccctgtgacccagcaaatccactcctaggtatagacccaagacataagtccacacgatcacttgtacctaaacattgacagcagcattcataaacattcatagaagccaaaacatggaaacactcaagtgtccatcagtggacaaacggatgaacaaaatgtggtatatccaaaccacagagtattactcaatcatgaaaaggaatgcagtactggggcatgctgcaacacggatgaaccctgaaaacattgcactaagtgaaagaagccagtcacagaagcccacatatgacatgattccattcatgtcaaagtccagaataggaaaatctaaagagacagaaagtagattggtggttgcctagggcagaggaggtgggtatagatgatacctaaagggtttcctcttgaggtggtgaaaatgttctgaagttgattgtagtgatggttgcacatatctgtaaatatactgaaaactgttcatatatataatatatatatatatatacacacacacacaaataaatcgataataaaatcattttaaatgggtacactgtatggtatgtgaatgatagctcaataaagctcttttaaaagaaagcctgcaaaccactggatgaatccagaatgggcaatgtcctacgagacaactggcctgaaattgtctaaaagcctcatggggggtgagtgcggtggtcacgcctgtaatcccagcactttgggaggctaaggcgggcggatcacttgaggtcaggagttcgagaccagcctgggaaacacagtgaaaccccttctctgctaaatatacaaaagttagccaagtgtggtggcgggtgcctataatcccagctactcggaaggctgaggcattagaatctcttgaacccaggaggcggaggttacagtaagctgagatctcgccactatactccagcctgggtgacacagcaagactccatttcaagaaaaaaaaaaaaaagcctcatgggcctcacaggaaggaaaggagaggggttgggtgtgttctatatgaaaataaactaaagaataaacacagcaaccaaggactattggatcctggtcaaaaaaaaattctgaggacagttggggaaatttggcatggattggatattaaatgatactattggataattgttaacattcttaggtgcagaagtgctactgtgtttactgaggaggacatccttattcttaagggataactatagaggtaataatttagacatgaagcatcatgatgtcagcaactgcacagcaaaaagtgtgtgtgtgtagagaatgaatgagaaaaagcaagtatagcaaaatagtaccaaccagtgattctgcgtagatgttaacaggtactcattatactgttttttgtttgtttgtttttcttgaaacagagtcttgctctgttgcccaggctggagtgcagtatcgaaatctcggctcactgcaacctctgtctcctgggctcaagtgattctcctgcctcaggcccccaagtagatgggatgacaggtatgtgccaccaaacctggctaatttttgtattttttagtagagacaaggtttctccatgttggccaggctagtctcgaactactggactcaagcaatccaccagcctcggcctcccaaagtgctggaattataggcatgagccaccacacctggcctcattatactgttcttttgatgttttgatatatgtaatatataaaagtcagagaagagatgtcatttttgcctttgtcttatgtctcaggaccttgaatgtcccggatttgccaagttgattttattccaaactgcactgaatctagccactttgtaccatgccctgccacattccggccctggcaccatcctccccctgcatgactgtaggcacctccatcactgggttcccccaaaaatctgttcttcaattgacagctcaaggagtctttccaagacgcacatagaattgtctctccctgtggccctgataatgaaggaagaggccgggcacagtggctcacgcctgtaatcccagcactttgggaggctgagatgacaggatcacttgaggccaggagttggagaccagcctgggcaacatagccagaccccatctctacaaaaaatttaaaaattagccaggcatggtggggtgcacctgtggtcccagctactcaggagacctagatgggaaaatcacttgagcccaggaagtcaaagttgcaatgagctatgatttcaccagtgcactccaacctgggtgacagagtgaaactctcttcctaagagagagagagtgagagagagagagcaaaggaagtcctcacagtggccccctcggccacctcctggatcctccagtgagttttggttatccaccccagggccttgttcatgctcttccttcctttaaacccttctattccctgtcaacgccttctcatctcttatgtctcaactcaagcctcactgctcagaggagcctcctcgaccccctcctcctccctcacagtccatcaggttctaaagacctctgttccttcttccaaccgcgtcctggctggtggccttgaggactgctggggtctcgctgcggctgtgtctggagctgaagcgagatggcctgacatcagtttccgttgttgaggatggtgtgtgaatcacatcttgcgctagagaatggtgcgtctaaggctcagcacacagcgatacctcgggaaatgtttgctgttatgcgactcaatacctggcctttggtgtggtcgtttgtctggcgtctccctgccccaccagcctgtggactccatgagggcagggcagcctggggttccctgctcattctggccctgagcacactggagagacaggcagtgcacatttttaaggaaaatgaaagacatggagttggatgaacatagggctgtctctgtgttcagggggccggcatgacggtgcaggagcagtggtctttgtccctttagctgttgccatgtaaatggggttcccatggagtctcagacccacctggctatggtctgcaacctttggctgttcttgcttaaggaacaggaagatgtgactttagcatgacccaaactgcaggtttacacgttggtcatgtctgagttaatgaagggtggtagacacagatatgacccccagggcccacctgcaggaagcccactgccatagcctccagctgtagcccttctgggcctgcctccactgcagacagctgcctcgccacagtcacatcctgcaaggtggccccacgctgtgactgatgaaggcggaggtctaaaggtcataccactttggcccaacacaggacagcggtggtggctactccagccctagaacgccctcctgcttctcacccctgctgatcccaggtgttgacccctaggacactctaccactcatcctgcacactgaactctgctttccggagaccccaaattgcagcttggggtgtgcctccattccaggaggaggcaaagaagctctcgctcctaaagcagaaagttccacagcttctaggtatgcatgaacgcatgtccttgatggtgaggacagggcccagccttcatatgccacttacaatgcagaatggccagctgagccctgggaaggacggctaggaccccaagtttttttcctgtctatggaaaagcgttcctcccagggtgccccttgtcactggtggccctagatggtgacttcccctccctggacttccacctggcagaatgatgccgacatactcaagaccacagaagtgggctgggtgcagtggctcactcctgtaatcccagcactttgggaggctgaggcgggcgtatcacaaggtcaggagttcaagaccagcctggccagcatgttgaaaccctgtctctactaaaaatacaaaaattagctgggcatggtggcggacgcctgtaatcccagctacttgggaggctgaggcaggagaattgcttgaacccaggaggcgtaggttgcagtgagccgagatcacaccactccactacagcctgtgtgacagagcgagaaaaactctatctcaaaaaaaaaaaaaaaaaaaaaaaaaagaccgcagaggtgaggggacaggaaagaaaactagatcttcagtgagaagtgacgtagacagggcactccatctgcagaggtggagtcctgaggagcaggaagctgtgttttcacgtcatgttttgcccagctgtccctgcccaagtccttgtcagcctctactggtcccaagaccatgggcctgcatgctcattaggccatgggcagcccgccttctctctgcttgcaaacctatctgacccctgtgtccatcccaccttgccccaacgttggccaagccaccatcttgcctggtttgaaccactggtctctatgcttctgatttctgcttcctgtggtctcccgcagccacagagcaatctttcaacaagtaaatcagacgagtcactctcccacttaaaactctccaagagcttctagtagcattagactaagatccaaactcctatgacaacccacagtgcccctgcctgctcagctcttccctctcacctcacccactctccctccgtcactgtgctccagccttcctgcgttctgtgatcccacaaaacctattccctgctctgcgcctgtgttcatgccggggatactttccccatagctctccttgctggatttttctcatgcatcaggtcttagctcaaatgtctcctcttagataccttaaagaactaaaagtagaactgccatttgatccagcaatcccgctactgggtatctacccagaggaaaagaagtcattatatgaaaaagatacttgcacatgcatgtttatagcaacacaattcacaattgcaaaaatgtggaaccagcccaaatgcccatcaatcagcaagtggataaagaaattgtggtatatatatatatgatggaatattactcagccacaaaaagaaatgagttaatggcatttgcagcaacctggatgagattggagagtattattctaaatgaagtaattcaggaatggaaaacctaacttgtatgttctcattcataagtgggagctaagctatgaggatgcaaaggcctaagaatgacacagtggactttggggactcagggggaaagggtgagggggggtgagggataaaagactacaaactggttcaatgtgtactgatccaaaatctcacaaatcaccactgaagaacttactcatgcaacgaaataccacctattcccccaaaaacctatggaaataaaaagaaatcaaatgtctccttttaagagaggccttcctccgggcgtggtggctcacgcctgtaatcctatcactttgagacgcctgtaatcctatcactttgaggtgggcagattgcctgagctcaggagaccagcctggccaacatggtgaaatcccatctctactaaaattacaaaaaaaaaaaaaaaaatcagccaggcatggtggcaggcacctgtaatcctagctactcaggaggctgaggtacgagaattgcttgaacctaggaggcagaggttgcagtgagctgagattgtgccactgcactccagcctgggcaacaaagcgaaagtctgcctcaaagaaaaaaaagaaaaaaaaaaaacagagagagagaaaggccttcctgaaccaccttatctgaagcgactcacccaagatccacttactgtctattatatcactcacttactctctcagaagttctcgctgggtgccgtggctcatgccagtaatcccagcactttgggaggccgaggcaggcagatcacaaggtcaggaggtcgagaccatcctggctaacatggtgaaaccccgtctctactaaaaacacaaaaaaattagccgggcatggtagcagttgcctgtagtcccagctacttgggaggctgaggcaggagaatggcgtgaagccgggaggtggagcttgcagtgagctgagaaggcaccactgcactccagcctgggcgacagagcgagactccgtctcaaaaaaaaaaaaaaaaaagaatttctcgtaactggccaggtgaggcggctcatgcctgcattttgggaggctgaggagggaggattgttgatcccaggagtttgagaccagcccgggcaacatagtgagacctcatctctacaaaacatttaaaagatttttttaaaagagttcttataactgggctgggcgcagtggctcatgcctgttatcccagcactttgggaggccaaggcatgaggatcacgaggtcaggagttcaagaccagcctggccaacacagtgaaaccccgtatctactaagaatacaaaaaattagctaggcttggtggcaggagcctgtaatcctagctacttgggaggctgaggaaggaaaattgcgtgaactcgggaggcggaggttgcagtgagccgagatcacaccactgcacaccagtccaggcgatagtgcgagactccatctcaagaaaaaaaaaaagagttcttgtaactaagggaaacattttaccttttgaatatattgttttacttccttatgacctgactgttctcccacctgacaacaggtctctcctgccttggttccatctgttgctggtgggagaacagcccttggcacgggacaggagttaagtgaatgtttgatggatgaatgaatgggtgaagctgtccagcctctgcaaggacgggcagggcaggaggagcccgtggtccacgctttcgagggagttctgcagacaaaggcggatgaggggcttctgttgtcttctgtttcgcattcataccatatggcttgttgcacactgggctgaattgcagatgctctaacttggagctttcttgcttttgtgtgttaatgacataaagatagaacatagctcaccacacattttgtgtttgctaactatctatatgtatataaaacagacttcagtgttactagccaacccacttgtgaagtggaaggaaaacagagcaattagagagagagagagagagagagagacggagtgagagcaaggcgaatgtgagcttagaatggggccagatcccggggcttgtgctgtgcgtgcttcctggggcagggtaggtggtgggagagatgggcctctgtgcttcccccaacctcagactctgctcaaatgcacctgatagcacccgcttcctccgggtcttccccaggaaaggcgctcccctgtcaccccacctccgacactgcctgctcccccttccaggccctcctgcacacatctttcactcaaacctgtgaaatatggagcgcctcccacgggcctctgtgcggcttccttctgccaggaaaagggcccccgacaagtaaacaaatgtccaattacaaaatgtctcaggtgctgtggagaataaaaatatggagcttaattaaaaggaggaagcatttattccagcatgtgagctgtatttcaaggcaaccaaatagccctgattgatatggaaaatttctttccggaggactctagtgaatcaacaggggtataccaaggtggggaggggaaagtaggggcactttgtccccatatttcattgctggcatagtttagagtctcaaggccatggtcatgataaaaagcaaaggacttggctgggtgcagtggctcacgcctacaatcccagcactttgagaggccaaggtgggaggactgcttgagcccaagagttcaagactagcctggggtggccaggcacagtggctcatgcctgtaatcccagcactttgggaggctgaggtgggtggatcatctgaggtcaggagtttgaggccagcctggccaacatggtgaaaccccatttctactaaaatacaaaaaattagctgggggtggtggtgcatgcctgtaatcccaggtactcaggaggctgaagcaggagaatcgcttgaaccccagaggtggaggttgcagtgagctgggatcacgccattgcactgtagcctgggtgacagagtgacactccatttaaaaaaaaaaaaaaagaccagggccaggagcggcggctcacacctgtaatcccagcactttgggaggcccaggcgggcagatcacgagatcaggagatcgagaccatcctggctaacgcggtaaaaccctgtctctactaaaaatacaaaaaaaactagccgggcatggtggtgggcgcctctagtcccagctactcggggggctgaggcaggagaatggcgtgaacctggaaggcggagcttgcagtgagccgatatcatgccactgcactctagcctgggcaacagagcaagactctgtctccagaaaaaaaaaagaccagcctcctgggtaacatgatgagaccccgtttcttttttctttttagaaaaagagcaaataactttcagtccactttatgattgctgggtctttttgtgttttttttacttttgcgatgagtctcgctgtgttgtccagcctggagtgcagtggcaacatctcagctcactgcaacctccacctcccgggctcaagcgattctcctgcctcagcctcccaagtagctgagactacaggctcccgccatcatgcccggctaattttttttatttttagtagagatggtgtttcaccatgccggccaggctggtcttgaacctctgacctcaagtgagctgcccgcctcagtctcccaaagtgttgggattacaggtgtgagccaccacgcccagccatgattgtttttaagttctctacagactatgaattcctactcccattgctgcatcagggtagactgctttcaaaccctgtccctccccaggtatgcctctagtttggaagaaatgaaggaaatagaaaaggcacccattttgcaaaccctaatcaaatgaatgactgattcaggaaacattatcgatgcatgaaactgttgggtcaggggctgatggggaacttgaccatggaacgataaggctgtcatccaccacctgaccccactggccaatctcagcatcatgagagtgggacagccagacaccacgggtcctggagctgaggacaggtgaacacacagcatcacctctagacacgaatctaattgggcttctagagcttgcttccatctccaaagaatatggggagagaggaacgagttaaacaactccatgaaaaagccaacagacaaatccaggatgtgcaatgatcccacaggagactgacccggtttctgcagcaaacatggaaaagagggggctgtgttagggtacaaaagacaaaaagatacaataagcagatgtgatgcgtggatccagttgggattgtgactcaggccaacaattaaaagacatatttgggacaactaggaaaattgtttcatattccagctaatttttagtagtgacagggtttcaccatgttggccaggctggtctcgaacccttgacctcaagtgatccgcctgcttcagcctcccaaagtgctgcgattacaggtgtgagcctgtatgaatacatgtgaatataaactgataccaagaattagtgttcattttggtaggtgtgttactggtgtggttatataagaaaacactcggccgggcgcagtggctcacacctgtaatcccagcactttgggaggccgaggcaggtggatcatgaagtcacgagatcgagaccatcctggccaacatggtgaaacctgtctctactaaaaatacaaaaattagctggacatggtggcatgtgcctatagtcccagctactgaggaggctgaggcaggagaatcacttgaacctgagaggcagagacagcaatgagccgagactgccccactgcactccagcctggtgacagagtgagattctgtttcaaaaaaaaaaaaaaaagaaaccactcatcctttttcaaaatgcatactcaagtgagtaacagtaaaatgacatcatgtttggaatctgtcttatgattcttcagccaagagaaaaagccctggctcaaggaagcagatctgacggcattttaattattcaatctgtaggataagtcaatgagggctcattatactatcatctctttacttgcgtgtatgtttgaaaatttttacaatgaaaacaacagaagcaaaagaagatgctgagaggaaattggtgagaggtgaaacataaaataacagcactgagctggagacaatggaatttagagattgtggccaggaaaggcctcctccaggaggggacgtcgatgctgaaggagccttcactaagaaagctggggaaatattggcggggagtgggaggcgtaggaacaggtgcaaacgcaccaaagaagcaaaaggcatggagtatcagagaaaaggggagtgagccaacaagccaggaacagaggggccacaggtaaggaggcccaggaggagacggcactagcaccagcccagccagatggggcctcgtgctccctacaggagatgtggtgtgatcacaatcagtgggatgctgtcagagggttttaagaaggggcagatttgatgggatgtactttttctttctttttttttttttttcgagatggagtttcactcttgttgcccaggctggagtgcaatggtgcaatctcgactcactgcaacctccgcctcctgggttcaagcgattctcctgccttagcctctcgagtagctgggattacagatgtgcccggcccatgcccagctaattttgtatttttagtaaaggcagggtttcacagtgttgaccaggctggtctcgaactcctgatctcaggtgatccaccagctttggcctcccaaagtgctgcgattataggcgtgagccactgcacctggctgacctctaagagttgattctagctattcagtgacaaaggcattttggtggggaagagccaccgaagatgaagagccagttcagcagacagtgcaactttccagcctgcagaccatggcttggtctaggatggtggcagagaaggagagaagtaaacagattggaaatatctggggatcagagagccactggggctggctggtgcatgccatgtagagggggttggaaagggaaattcaaggctaagtgccaggcttggggtttgagcagccaagtaaatggtggtgccatttttctgggatgtgggagatgcacattgcgacagggtggggaaattcagagctcacctttggatagcctacatcaattagcaacgcttgggaaacaggcaagtgagcagagctgccaagtgggcagggcagaggcgtgggtgggagacagcagggcctcctggggagggagcctatggagctcactgctcccaagctcccagggacgttctgaagaatcccatcatttacacagaggaggaggagccaaggcatgaaggggagcagccaggaaagagggaagggaaccaggagaccgtgtcgtcccttaaacccagaggagaggtgttctcaaaaaaagggagtggcagggtgtggtagcacccgcccataactctaacactttgggagactaaggtgggaggatcgcttgaggccaggagtttgacaccagcctgggcaacatagtgagaccctgtctctacaaaaaaaaaagaaaaaaaatccaaaattggccaggtgcagtggctcacgcctgtaatcccagtactttgggaggccgaagcaggcggatcacaaggtcaggagttcaagaccagcctggccaacacggtgaaaccctgtctctactaaaaatatacaagaattagccagagatgatggcatgcgtctgtaatcccagctactcaggaggctgaggcaggagaactgcttgaacccaggaggcagaggttgcagtgagctgagatcgtgccattgcactccagcctaggtgacagagcaagactccatctcaaaaataataataataataataataataataataataataataaaattagccaggtatggaggtgcacaactgtagtagcagctacttgggaagctgaggtgggagaatcacttgagctcagaagtttgaggctgcggtgagccatgatcacaccactgcactccagcttgggtgacagagtaagaccctgtctcaaaaaaagaaaaagaagggaataatttgctaggcccaacattcctgagagggctgtgaaatcaagcctggtgtgtgcccttcaaagttggagaaatggggggcactgctgagtacctttgtccatttgggctgctgtaaaaaaatcccatagactgggtggcttatagacagcagaaatttatttctcactgttctggaggctgagaagttcaaggtcaagacaccagcagattcaatgtctggtgaaggcccgcttcctggctcatagaaagtggccttgtcactgtacccttacatgctcacatggtggaaaaaaacaagggagttctcttgggcttcttttttttgcgacagagtctctctctgtcgcccaggctggagtgcaatggcgcaatctctgctcactgcaacctctgcctccctggttcaagtgattctcctgcctcagcctcccgagtagctgggattacaggcacccaccatcacgcccggctaatatatatatatatattttgtatttttagtagagacagggtttcactatgttggccaggctggtttcaaactcctgacctcaagtgatccacctacttcggcctcccaaagtgcggggattacaggtgtgagccactgcgcccggctggcctcttttacaaaggcactaattccctcccacaggcctcctaacaccatctctttgggggttaggattttaaatgtacagatgtggtggaagcttcggtgacttcgctctctgcttctctcctcttcctgagctgcttagggacccctgctgctaggcgcttttttccctgcatttcttatgctgttctgtgatgagcagggccctctttttctcctccaccggggtaagcatcttgagggcaggttgcctggttcagacttcaagccccagaacagaattcatccctgcagccattcccgcaggctaaaagagcaccggttgtgtgcacggcacctcgtggacccggtatgatggcactataactgatttccctgttacccaccagcatgaagggcatgaagacagggaacttcattagctgtccccaaacacaggaaattagttcattgaggccaggtgcagtggctcacacctgtaatcccagcactttgggaggccgaggcaggcagattacgaggtcagaaattcgacaccagcctgaccaacatggtgaaatcccgtctctactaaaaatacaaaaattagccaggcatggtggtgcacacctataatcccagctactcgggaagctgaggcaggagaatcgcctgaacacaggaggcagaggttgcagtgagccaagactgcaccactgtactccagcctggatgacagagtaagactctgttccccaccgccccccccaaaaaaaaggcaagaaactccatcagttgtccccaaacacaggaaattagctcatcaatcacccaccaccccaccaaaaattaatcagggtaaacttaagaagggactccttgtgggaaccaaggaacagaccctgaaaatatagaaaatatagctatcttctccctaaaggccaggcacacagaacccaccacggccctcacgtcagcctcacattcatcctcttcattatcctcctggccagaggagaagtgacttccccaaggtcacatgaaggaacactggagttgggttccatgcacaccagggcacttctcttcagcagaggggatggcaccatgggcacctgccagccactgcagccactccagggcctctccctgcaggatgctctcctgaatgagcctcatatcaggggctgcccatcctttggcctcccgacacccctgcccataatttatctttcccttacactgacacaatattttaatattttaatatttttttagagacagggtctcaccctgtggcccaagctggagtgcagtggtgcagttacagctcaccgcagcctcaaactcttgagctcaggcagctctcccgcctcagcctctcaagtaactgggattgtaggcactcaccaccatgtctggcattttttttttttttagagagggggtcttgctatgttgcccaggctggtctcgaactcctgggctcaagcgatcctcccaccttggcctcccaaagtgctgagccactgtgcctggcctggacacagttttatatattaattttagataatatcacacactgacaataatgaatactggcaaggatatagagaaaagagaaccctcatatactattggtgggaaagtaaattaatacaaccactatggagaacagtatggaggttgctcaaaaaaaactaaaaacagaactagcgtataattcagcaaccccactgccatgcatttataaataatctggttagttataaattgtatttttataaattgtatgttataggtatatttctaaaggaaatcggtatatcaaagagctagctgtacacccatgtttattgcagcactattcacaattgctaagatttggaatcaacctaagtgtctatcaatggattaacggattaaaaatgtattacacacaaaaaacaatcacacactgagttgtttcttttttttttttttttttttgagacggagtcttgctctttcacccaggctggagctcagtggcgcgatctcggctcactgcaacctctgcctcctgggttcacgccattctcctgcctcagcctcctgagtagctgggactacaggcgcccgccaccatgcccggctaattttttgtatttttagtagagaccgggtttcaccgtgttagccaggatggtcttgatctcctgaccttgtgatctgcccgtctcggcctcccaaagtgctgggattacaggcttgagccaccacgcccggccgagttgtttcttttttaattctctttcaaatgatccagttaatcaaagagaaagtatcagtttgaagctaagaagctttaacacctcgctaatgtttgcgtttctcccttctaaaaacactgtggggcgggacgcagtggctcacgcctataatcccagcacattgggaggccaaggtgggtggatcgcttgatctcagcagtttgagaccagcctgggaaacacagtgagaccccgtgtctcccaaaaatacaaaaattagccgtgcatggtggcacatctgtggtcccaaccacttgatgagtggattgctggaggtgggaggatggctagagcccgggaagacaaggctgcagtgagccgtgatcacactgctgcactccagcctgggtgacagagcgagaccctgtctcaaaaaaaataaaataaattgtggtaaaatatacacaacataaaattgaccattttaaccatttttaggtgtacaatgcagtgacattaagtacattcatagcgtgcagccctcccatcatccatccacagaactcttttcatcttgtaaaactgaaactctgtaccattaaacgaaaactcctcatgtccctcccccagcccccagcaaccaccattcaactttctgtgtctgtgaatttgaatgctctagggacctcccataaacggaatcacagagtcacctccttctctacacaggtggagatcagggcctcaggctcatgtcttgggcaggcagcagcctctgcctcctgttgctgtcctgagttataaacattttcttacttcccttctctttgtggctagcaaggctgctcttcttccatttatgataatggattgaaatctacttttcaaacaagtggatctaagtgagaaatagaattcatagtgaaaggctgaaggtggagaggctctcacagcagaggagaaaagaggggaagaagttgggaggtggagaaaccctggccttgggagtgaagcctcctttgtgtccagaataccagcgaaggaatgcgcccctgactcggtgcacccggcctccttggcttcctatcgcctttcgtagctttcacctttgccctcatccattcatccatgcacttatttattcagcaaacttggctgtccagagcctatggttggccctggggaatactccggccccccggcctgggacgctcccaatctaactcctctgcaaagccttcttccgtctcttgttctgtttgtttaatcctaatcctaacctcatctaggaccctatcatgcagactctgagtcagctctgaattcccacgtgaggtcccaaggtcagacaacgaccttggccaggttgatatttaagggagtaaagacatagggtgaggtggctccacccaaagagggcagcctcctgctgttgctctgcacacgtgtgggctcaactgtgccaaatcatcctattgtcccctgagccagaggccctcccgtatccaggaattcacagctttgctagcatgctgggctggccagtggtgttccagatgagtcctgcttggttagaccccagctttcccacagagtgtgtgaggtgttcctgggagctcctggagggcagggccatgtcggtccactccagcccactagagcttgccctgggctggcacacagaggcttccaaggccaccaggctgagtcatcagtggattcccatatgactgatgtaagcgtgtggccgagggatgatgccaggagaagtcaggattcctggggaattgagacaatgagtctaatgtccactcccatgtgcaggcctggcatctacacaaccagggccagtggatttccagaccttccacatgaggggccaacgtgggtctgcaggactactaggaggctcactggtaggcacaaatgggcctgcccaggactagacaaactttcacggttcattgtcctttgacatccatgactgtcttggttgcaagttataagaagtccaaacccaactggctacataaaaacatgaaaatagcgaattggctcctgtatccaggaagcttctagtaatccagtcttgggcttgattggatccagaacctcaagggatcagaagtctgcctcccagaacctctggctctgctttccaggaaggacttccctctacgaaaggtcaacttatgtggcaagatggcctcatggctgcaggcccacttctagtcggcttagcaactcctgaggctcgtcattggcccagcctgggtcattgtgcttatgcctgagccaatcgcatggccaggaatgcgggattctgattggccaaggcccctcccccattaaagtgcagagagggtgtagcttggaggaaaatgctggaccctgacaggaagggagaggccagggcctttgctatcccagcccgtgctctgtcttgcagctgtgcctgtcttcagaaatcccaaaatgagatttaaatgaaagctgagggtatggcagtcagacacagaacagaacactcttgtgtgttaactggtgctgagagggtagcttcctgctgcgtatctgcccagccacccccacctccccaacctcatcacacactcccactctttcaagcatcttcaaattagtctctgccctttttttttttttttttttttccagagacaggggcttgctgtgtcacccgggatggactgcagtggtgagatcacagctcactgcatccttgacctgcagtgatcctcctgccttcgcctccagagtagctgggactacaggcgtgcaccaccatgcctggcttatttttctatttttttgtagagatgggggtcttgctttgtagcccaggctggtgtcaaactcctgggctcaaaagatcctcccacttcggcctcccaaagtgctaggattacaggtgtgagccactgtgcccactgcccaccctgtctctactccttacaaccctgaagttaatacagaatccaaaaatgtcagctgccatcattatcctatcatacactaagttaaaaggccaattttaattttccctggaagttttcattggtcacagcctccatctgaagaagcgatggctaggcttgctccccaatgtaagaggaggttaggccgggacagaagcaccctttcactggttttcatccttcccaccttggtggctttacacagcagtgtgcgctggttctgagcaggaaccaagccttggggagcatgggttgggcccttgcctggctggctggggggcctgtgcaggcagattgtcccgcccagggaggacaggagccaagcctccagggctttcccatgctcacgttccctggcgctgggccgcagacactctgtggttgacagcctggtcctgttcatcttgcccggctcccacttcacagctcacactggtatagtgtggccccctcctcttctagtatttccatgtgtagcctcacaagataactggctcatccaggtggccacagatgtccagcttggccccacagcaaggccttagccagctccactgccagccacagcccacaccttccctgatcaacctttgctagcagcggggctctttaattgtccgctaagacgcctttgaggacctggtagaagttaggctccagctgcctggggaaatgcacatgggcccaacagtaggcaggctcctgggtctccaaaggctgtccagggatcccatgttaaggaatcctatctgggaaggacttcccccttgcaatcccttggtcttccttctccttaacctttatgtcctggtgcccgtcctccatcatcagagcctgaaccatataggaagctaagcaaataacccccaaatctctttatgagtaataacaacacaaattgagcagttaccttgtgccagatactgttgaaaacacttgaggggtattaatacatttacccctcaccgcaaccccatgacgttgggacaattagaattatacccattttacagatgagaagattaaagcacagagaggttggagaaccttcccaaagtctcatagcaaaggggaggtgttgccctccctacacagcagctggttcaccacctctgatgcaatccacagtctccctcaaggctgggccaatgctcgggagctctggacttgaggcaagcacagaatggaatgaacccaaacacccaaaggtgagctgccctagaaaggcggacattgggccgggtgcggtggctcatgcctataatcccagtactttgggaggcccaggtgggcggatcacctgaggtcgggagtttgagaccagcctggccaacatggtgaaactccatctttactaaaaatacaaaattagccaggcatgatggcacatgcctgtaatcccagctacttggtaggctgaggcaggagaatcgcttgaacccaggaggcggaagttgcagtgagctgagatcgcgccattgcactccagcctgagcaaaaagagcaaaattccgtctcaaaaaaaataaaaatgaaaacaaaagacatcagtggtttctgaagactccaagctgctgtataggctgtgtctgccatcttggacacaacttttctattgttcctattaaatgtgttcatccttctggcttacatgccattttcttcatgcaaacttcttgccatccaaggatgggttggatacatccttctccacatgaagtcatagccccaagactcttcccttcccagccctatcatgctacactgcaaatgcatgacagcctcccttccacaccggaagctcccaagagggcagggattgtgtcttgctttgctatgtcttgaattaaaaaataataataataattattggctgggcgcagaggttcacacctgtaatcccagcactttgggaggccaaggagggagaatcacttgaggccaggagtttgagatcagcctggccaacatagtgaaacactgtctctattaaaaatacaaaaattagccgggcgtggtggcaggcgcctataatctcagctacttgggaggctcaggcagcagaatcgattgaacctgggaggcggaggttgcagtgagctgagatagcgtcatcacactccagcctgggcaacaagagctaaactccgtctcaaataataataataataacaacaataataataaggccgggcacagtggctcactcctgaaatcccagcactttgggaggccaaggcgggcggatcacgaggtcaagagatggagaccatcctggccaacatggtgaaaccccgtctctactaaaaatacaaaaattagctgggcgaggtggcgcatgcctataatcccagccgctcgggagactgaggtaggagaatcacttgaacccaggaggcagaggttacagtgagctgagatcgcgtcattgcactctagtctggacgacactctgtctaaaaaataaataataattattattattatttaatttttattgagtaaaagatacattcagtaaagtgcacaaatcctaggtgtgaacttttatgtatgtatcaatcaatgagcttttatgtatgtatacagtcatgaaaccaccactcagatcaaagcatacatgtctagcccctagaagtttcccctggtctcctcccggtcattactcctcaccctaggggtaaatactgttacggtgactgctgtcttttcttaaacttcaaataaatggaaacttcaaataagtgtgtctggcttcttgggctcaacatgttgtctctgaaattctcatgttgctgcatgattccttggtttgtcctttttattgctgtgtggtattccattgaattaatataacaacatttatgtatccattctattcttgatgaacatgtcagctaggatgtggaggatttgggctctatctttgctggtgggtgtatacattgctgtaatgactaaggaaaactgtcttgtctaccatcattataataactcatttagtgagcatttactgtgtgccaggtactgtacaggagtcagctacattatctcaatcttcacaatgatccttgggagtagatagttgccatctgtgaaacaggataattgtggcatcaacatgaataggattattgtgaagtttaattgagatgatactttgaaggacttagcccagtgctgccattttggaaacactgtttatgatacctgttactggtgattcctaacgggcacaggatggggggttcaggtgcctgggtccctgctgagcaagtagcccagcagccttggcctcagagcacctgggggaatcatgaatttgtgagcctctttgataagaccctggctctaacttcaagaaaacggtcactaggggagggtgagggacaggactgagactttagcttaagaagggccctgggagcattccagagccttcttttacgcacatcttcctgaagctgagtacagagggtactctgaggtgatgactgttccttacctgtctctctcattagccggtaagccctgcaagggcttggccagtgcctgtctttcaaatgttcattcagaaacaatttaagtgtctcccttggtccaggcactatgccaagaactgacagatacagcagtgagcaagatgggcaaggtggggagagagacaagaaacagagaggcaccaagactgtgtaggggctgggctcccagcactttgggaggccaaggcgggaggatcgcttgagctcatgggtttgagaccagcctgagcaacatagcaagaccctatccctacctgccaccccccaccccccgccacaataaaaaatacaagtcttgagggagaaaggacagaggagctgtggagaggaggcctgaggtctgagggtgggggatcagggtcaggtcctgtggagcctgtagcctaggacacggagtgtggatttgacccttatgcgaaacaactggaaggctttttgtttctttttctgtagaaatgggggtctcactgttacccaggctggtctcgaacaccccaagggatcagccgtctcggcctcccacaatgctgggattaaaggcgtgagccaccgcgcccggcctcaactggaaggctttaagtgagagatggggtgcaagggaatcccagagtcagaaaggtcttcagagagccaggaagggcttgcgggggaggggcgcatatggaaggggcgcatggaaggaactcacagattccttgaatgaatgaatgaacgacccaatgcactgacggatgaatggacaggcggccaggaatagcagccggcccccagggagccccagaccccgcggcctgaagccttggttctaggccaaggcacaggcgcggtgaccttggggatgtccccgcccaggactcagggcccggaactcggcgtctcgggggcggggagggcgtgcctggcgggacagcgcgcgcggaggaacggcgggcggtgctcctcgggtaggccccccacacatccccttggctcagccctgccggggcccgaacccgcgccgcccgccgtgtttacattccacccgcgccagccacgcggctttttgccgctccagcgccgctcggccccgcccccggcgcccgcggcccgcccctcgccgccgcgcgccagacttctcccgcgtcccgcccgccgccccgccccgcgtcccgcgccccgcgccccgcgcccggccctcggcgcgcaggccctgtcacttggccccgccctgtccgccggccccgcccctgattccccgtccctgcgcctcgcgggccggcgccgtggaggggcgggtccgggggcggggcgagggacggggcgggacgggctctgggtcccgcgcggccgctgaggggctgggagccgcggcggggcggtgcgagggcgggccggggccggttccgcgcgcagggattttaaatgtcccgctctgagccgggcgcaggagcagccggcgcggccgccagcgcggtgtagggggcaggcgcggatcccgccaccgccgcgcgctcggcccgccgactcccggcgccgccgccgccactgccgtcgccgccgccgcctgccgggactggagcgcgccgtccgccgcggacaagaccctggtgagtctactgccgcgggctgcggacagggactcctggggcccagaccgcgccggggagctgggtgggggcggggtgcggccgggtcgcgggtccccgggcggcgtcgcggggcgcccgggagggtgctgagagcgcggcggggtggggtggaggggacactgaggcagcccgggccccgggaggcgacgggccggtgagggcggcgggggcggcgggaccccgggtcgggggtcggcgggtgcccgggtcgcgggtgacaggccaccccgccatcggccatcttcctggctcgcccggccgcccgcgcgcaaagggggaaggggtactgggcccgcggcctgaccccgccgccgcctcaccccgcgccgccccgcaggcctcaggccggagcagccccatcatgccgagggagcgcagggagcggtgagtgcccgcgccgcggggccggacgggacgggacgggacgggacgggtggcgtgggggaggggcggccgcgggtgctcacccggcccggtgccacccgggtccacagggatgcgaaggagcgggacaccatgaaggaggacggcggcgcggagttctcggctcgctccaggaagaggaaggcaaacgtgaccgttgtgagtacaaaagagacaggttggggagcatcccccccatctcacctgggtacccgacttggctctgcctacgggggcgggggtcccttgggcaggaacggagctcataacctgatcagctttctcttcttctctctgtttttgtcttgtttggtgtgtttccttggggtcatgggggtggcttcatgttagtttttgcaggatccagatgaagaaatggccaaaatcgacaggacggcgagggaccagtgtgggagccaggtaggtccgcccggggttgggcctctgtggaggtccttctccccctgggtcacatggggtttcatgctgtcttgtctcttgctggagacactctggtgagagtgaacttctctaatgcagccacagcccatatggcccagcactgtacctgtcagtgggcactggcctctgccagtcctgggattccaggaagcttggtgttcctgactggcaccgtctgagattacagatatgtgcctagcctggaagaaccagaatggacatcacagtattcagtcctccccttctgcccaggaggaaactgagactcagttagaggaagaaagtaacccagagtcctgtgccatccaggggcaaagttgggctctcggccttgtctgtaaaagctggtgaactgggggagggttcctgggtgtttataagcaacaactttccccctatctacacctatttttcttgtcatggtgtttaaggacctcctccgtcttctgtaggtcagatttcaaattcttctcctctttctggccctggaagttcttatagcccctccagcaattacctgcattgatccccagctcagcctgacctcagcaagagtatcagtggaacattcagtgtaatgataggtggtgtctcaatacatttttttttgactgcttttcttttctctccttaaggagttcctgccaaatttcctgcatgcagtgtgataatcattataatatcagaagtttcttgcagaaaaagcttgtactatctctttactttcagaaatggctggagactgtagttatggctccagtgggggaagcagcctatctctaaactagctggtcaggccttctgactctatcacagataaacgctgaacagaaacagtgttcgacctgagtgcagggatcccagctaggttagcagagaagcccctcactttgcagagcagcagccagggtagttcatctggaagcgtgaagggtttcaacgcagtgcgccgtgttctaaatagcagttgtcactgcatgtaaggtcccccgaaataagcatttctgaggagggtccactgactattgaagaaagggttgctgatttcctttttcattcaaagaaatcatttcagagacggaaatgagacggcatatccccagttttttttttcttcccttaaagtacattcaaatcaagcaagttgattttttaggtattataaaatgaattctgactttgtgaaattcaggactgtttattttcccagctgtgttttgaatagaaaagaaacttccagctgaagatgaagcagggccgtccctgttgcattcttggagttttagaagcatgtctgttctcaaggatagcctgagcagtgacgagggtgcctcctgggacggattgtggctctgtcccctggccacagtgtggatagctgtgctgccggaatagccataccatttcccactagaaggcattttcgtggttatccagagattaatggcgacagatttctatacgttttgtagagtagatagcttaaacattagctgtctatgtatggagcagtatctttgttatttctttgtggagcttcatgaaactagaacttgggggtacaacagaacctttttccctgctcacatacagaatttttctctggagttatcataattccccccagtacgacagtcttgagctacttggagccattgtgccaaactcttgtgtaactgcttcatcgagaccacatggaagctttttaattttcatcttaggctgttcttaatgaaaagaatacccttttatctaagatctacttaacacgtccattttgttgtttaatttttttgcacaagactcaatctttctattgaagtggaatcctggactgttacttttcagaaaataatcctatgtaaggaaaaaagtggtatgaggagttggagtggttaggaatcccgtgggtctcttattgttatctcattctttcctaaataaagtcagacagatcttgctttgaaacttggtgtacactcaaggacatagacttaattattctacctcatccactggtccctaaaaaggccaactttggaaaccatttgtctgctgatggttcacctagtttgggaactgctgctggactcatctatgtccaaaggcctgctctcagatgtgccagccatctggctgtagagggtggcacccagcattatgccttcaagactagaattcattcttcctgaatgaagaacaacttacagcggttgtaatgtgaccctttttgagttaaggaaatgccacccgcacatggtactagaactgaaaggaagcagccttgctcgcacagctgttggcaggagctgtcatggataatttgcatgcccaattctttgtacattgggtggggaagagctttatctggctttgctcttctaactgaaagtgcttgggcttcctctgaaggcggccaatgtgttgtggtcgccaccatgtgctgtgtcttcgaggtagcacttacagcccgagtttccactttcatttatagtgaccccagttgtctattttgttctttagtcaatgttaatggtctctgcttttttttttttttttttgggggggggacagagtcttgctccgtcacccaggctggagagcaatggcgcgagctcggctccctgcaacctccgcctcccaggttcaagtgattctcctgcttcagcctcccgagtagttgggattacaggcgcccgctaccacacccggctaatttttgtatttttagtagagacggggtttcaccaggttggccaggctggtggtctctgctttaaaaaaaaaaaaaaatgccaggtgcggtggctcaggcttgtaatcccagcacttttggaagacaaggcaggaggatggcttgagtccaggagttcgagaccagcctggacaacatggcaaaaccccatctctacaaaaaaatacaaaaattagctgggtgtgctcgtgcatgcctgtagtcctagctgctcaggaggctgaggcaggaggatcgcttgaccccaggaggcagaggttgtagtgagctgagattacaccactgcactccagcctggggaacagagggagaccctctctcaaaaaaaaaaaaaaaaaagccaagtctcagactttcatatggcttccatgctagtaggattgttacctgcctaatatctttagcaaagttactattttataactttaaaaatcaaacagacttcttagagtaggaatagctttaaaaatgaaaatattctaaatggactttagtgtttttcagatattgaaaattgaatacatatctgaaacctttaaaagaaaagcatagtgctttggtttctaatagttccttattttatcaggtatttgaattaccctgcaagactcaggagattcagaggtcttaaggagtgtctaggctagcttcctgtagacttcatagtatgacctgtgaccatcacttgatttggttttaactaggtggatgttcattctgtttgtttcgagttaaggaaaagaaaaagtcctttattatttaacatatttggctagtcctgcaacaaaaagaaaatgtcacatttgatgagtttttgttttaaactgaggggactttaatacatatggcagccaaatttacatttttgatcttttttttattatacttttaagttttagggtacatgtgcacaacgtgcaggttagttacatatgtatacatgtgccatgttggtgtgctgcacccattaactcatcatttaaccttaggtatatctcctaatgctatccctcccccctcccccccatttttgatcttttatactaatgaatgtgaagtgcttatgtaaatatttttattgacagttctgttttacttttaagaaattttagtagatgcattgtactcattaaaaaaatctttgagttgtgacaaaaaatatcataatgtatctttttggaagcactttcagaagtcatgcctagtatcttactgagttgcaggtgaatttgtaatgtttttgggtaatgtaagagctgtttgcatcttatctcacctctcctgtgtatttttcatttacagccttgggacaataatgcagtctgtgcagacccctgctccctgatccccacacctgacaaagaagatgatgaccgggtttacccaaactcaacgtgcaagcctcggattattgcaccatccagaggctccccgctgcctgtactgaggtcagtgccgactctgccacatggcttccaggtctcttactccatgctcccctttatccctcatagcatggacgcattcttacccctttgtgggcctcatttttgttgtgtgttttgttgtagctgggcaaatagagaggaagtctggaaaatcatgttaaacaaggaaaagacatacttaagggatcagcactttcttgagcaacaccctcttctgcagccaaaaatgcgagcaattcttctggattggttaatggaggtgagcttgagtcttcctgttcgcttcatgaaagcactgagcatttccagcatttttgtgtattaggacctctgtgtggtttattccctcgacatgttctccatctctgaagctatatggtatatttttactgtggtggtctttctgttttgcttgtattcttagcaagaatttctgaaatctttttatccttcagatgttttaaaattggcatctaattttttccatccaagtttaaataattgttaagattgtattttccagtaaattgtaactgttaacatttgagctttgttcattatgttcattaaattgctttttttttttttttttttttgagatggagtcttgctttgtcacccaggctggagtgcagtggcacaatctcagctcactgcaacctctgcctcacgggttcaagtgactttcctggcctcagcctcctgagtagctgggattacaggcgcacgccatcacgcccagtattttttttttttttttttgagacggagtcttgctctgtcacccaggctagagtgcagtggtgcgatctcagcttactgcaagctcctcctcccgggttcatgccattctcctgcctcagcctcccgagtagctgggactacaggcgcccgccaccacgtctggctaattttttgtatttttagtagaaatggggtttcaccgtgttagccaggatggtctcgatctcctgacctcgtggtttgcccgccttggcctcccaaagtgctgagattacaggcgtgagccaccgcaccctgcctaatttttgtatttttagaagaaacggggtttcaccatgttggccaggctggtcttgaactcctgaccttgtgatccacccacctcggcctcccagaatgctgggattacaggtgtgagccaccatgcccagctaaattgcttttaaatgtattcactgggatgcatatatcacctgttttatagctactgtcataaattgtaaacatatatgaacaagcttatcttaaacaggtctgacattgctcctttttaacttcttggaatccattcccttttccaccattcccatttattctaataaaatatattgttcaaatcctggctgggcacagtggctcatgtctgtaatcccagcactttggaaggccaaggcagaaggatcccttgagcccaggagttagagactagcctgggcaacatagcgagaccccatgtcttttttttttttttttgagacggagtttcgctcttgttgcccaggctggcatgcaatggtgtgatcttggctcaccacaacctctgcctcccgggttcaagcgattttcttgcctcaggctcccgagtagctgggattacaggcatacgccaccacgcccggctaattttgtatttttagtagagacggggtttcctccatgttggtcaggctggtcttgaagtcccgacctcaggtgatccgcccgccttggcctcccaaagtgctgggattacaggcgtgagccactgcgcctggcccttgagaccccatttcaacaaaaaataaaaaattgtcagggtatagtggctcaggcttgtagtcacaactactggggaggctgaagtgggaggattgcttgagcctgggagttggagcttgcagtgagctgtgatagcgccactgcactccagcctaggtgaccatgagactctgtctcaattttttttttaagcatatttttaaagatatttggaccattggagtggcttctgtgttttgagacagagttgctctgtcacccaagctggagtgtagtggtgcagtcacggctcactgcaggctccaattcctgggctcaagcagtcctcccacctcagcctccgcagtccttgggactacaggcatgagccactactccctgccgattttttattttttgttgagttggggtcttgctatgttgccccggctggtctccaactcctgggatcaagggatccccatgccttggcctcccaaagtgctgggattgcaggtgtgagctacagcacccaactcaaatcttttcttggtccacactattttatttctctttaacagttaatcaaaagaacaagtataacaacatttgatagataatggttaaacataaaagatgagattttattggttgtatatcttactgggatgaactgcggtagcttatagtttcttgattaagggaagcttcctagacaaccttgtaagacttgaatgggtgagaagtgggcttttcttctgaagtggaaggacatctcaggcagacctgcttcatgaaaacatgtagaagttgagtgtgtaactacagaagtacccctcatcctcgggggtacatcccaagacccgcaggagatgcctgaagccacagatagtactgagctctagatatgccatgtttttaatcctctactttcatgttttcacttaaagaaagcacttcacggcttctctttggcatttccaaatagccagcatcactactcttgccctgtggggccattattcagtcaaataagggctgcttgcttgaacaccagcactgctgtgctgtgacagtccatctgatgacctgtgtgctagtgagtgactaacaggcaggtggcctactccacggggatgtgcgggcaaggggatgattcacatcctaggcaggtgagggtgggacaggccagaagggcccctcatttaaaacctatcagttgttaggctgggcacagtggctcatccctataatcccagcactttgggaggccgaagcaggtggatcacttgaggccgggagttcaaaaccagcctggccaacgtggtgaaataccatttctactaaaaatacaaaaattagctgggcatggtggcgggtgctggtaattccagctactcgggaggctgaagcaagagaatcgcttgagcctggaagttggaggttgcagtgaaccaagatcacaacactactttccagactgggtgacagaataaggcacctcaaaaaaaaaacaaaaaaacaaaaaactatcaattgttgagttcaggaactttgcattttatattttccttcaccaaagtcattacaagttttttttttttcccctccctcaagtaaaacttacttgtgctaaaacttactaaatatgttttcaggtgtgtgaagtctataaacttcacagggagaccttttacttggcacaagatttctttgaccggtatatggcgacacaagaaaatgttgtaaaaactcttttacagcttattgggatttcatctttatttattgcagccaaacttgaggtaaataattttcaaatatttgttctataatgtgtgttatttctcgagctccactgagattgggggaagaggttggcgcttagcctatagcactcatcctaaatttttctgatttgctaccctgtaaagttaagacacatgccaaaaagaaaaaaaggctggaaagtgaccaggaagagaaaagtagtgagggtatggaagacctaggttcatgtagttacattgagccaaaaaaaaaaatgaactttgaactaagataataattttgggcccgggttggtggctcaagcctataatcccagcactttgggaggccaaggcagctgggtcacttgaggccagtagtttgagacatggtgaaataccatttgtactaaaaatacaaaaaattagccaggcgtggtggcacgtgcctgtaatcccagctattcgggaggctgaggcaagagaattgctggagcccaggtggccgaggttgcagtgagtcgagatcctaccactgcactccagcctgggcaacagagggaaattctgtctaaaagaaaaaagaaaagattaaaaatttgtgtatgattatcaaagggtatatgggcccaactttcaaatgtgttaaaggtactgaaaaggggatatttcaagagtacccacaatgagtcaaagttccatccatttatttaatggtgggtgggagttgtgttcttttttttttttttttttttttttacaaccattggtgtggcttctgtgttaattccatcagtgcgccctctctctttccatgccagggtactgagaagtcattttggatgcattataaattgagactgttagagattggctttggtgctagtgccatcttttatttcctttcaggaaatctatcctccaaagttgcaccagtttgcgtatgtgacagatggagcttgttcaggagatgaaattctcaccatggaattaatgattatgaaggtgggttccagtgaattttccggccattttttaaatgcgtacggcagatcttttccacctgaagtgtgagtgcctctgggaggtgttctccagctggacacattgtggcatggaacatggctgcattttgaacttcttttctcaatcatcggtctcttttctctctgttttcctttaggcccttaagtggcgtttaagtcccctgactattgtgtcctggctgaatgtatacatgcaggttgcatatctaaatgacttacatgaagtgctactgccgcagtatccccagcaaatctttatacagattgcagaggtaagtggctccatcacgtccgtggggccaccttccctgcagctggagtgaggaactctagaataggcgtgtggtggcatccatctcagcgttcttttcttctccgtagctgttggatctctgtgtcctggatgttgactgccttgaatttccttatggtatacttgctgcttcggccttgtatcatttctcgtcatctgaattgatgcaaaaggtttcaggtaagttggctttccagtgcatgcacaaacaaggtgtactaagcttacatccagttgtcagcctcagattaagcccacgatgtcttcactgcagggtatcagtggtgcgacatagagaactgtgtcaagtggatggttccatttgccatggttataagggagacggggagctcaaaactgaagcacttcaggggcgtcgctgatgaagatgcacacaacatacagacccacagagacagcttggatttgctggtcagtgctgctccttctttcagtccttcttggccaaattcttaaaactgcctaaataggccagccgcggtggttcaggcctgtaaacccagcactttgggaggccgaggtgggccgatcacttgaggccaggagttcaagaccagcctggccaacatggtgaaaccttgtctctactaaaaataaaaaaattagccggctatggtggtgggcacctgtagtcccagctactcgagaggctaaggcaggagaatcatctgaacccgggaggcggaggttgcagtgcgttgagatcacgccactgcactccagcctgggcaacagagcgaaactatgtctcaaaaaaaaaaaaactgcctaaataacctgttcacttttcttcaggcaggccccaaatatccttgaaaaactccaattttaattaattgaaaaagaaaaatcctggcaaattgatgctgtatctcactatcatatagactatagagttttaaagtgctctttgatatttttttttctttcactcacctccgtagaaaaagacatagtggccagacacagtggcttttggaggccaaggcagaaggactgcttaagctcagaagtttgagactagcctggacaacatagggagaccctgtccctaaaaaatttaaaaactagccaggcatggtggcacatgtctgtagtcccagcactttgggaggcggaggcgggcagatcgcctgatatcaggagttcaagactagccaggccaaaatggcgaaaccctgtctctatgaaaaatacaaaaattagctggacatggtggcgggtgcctataatctcagctactctacttgggaggctgaggcgggagaatcggttgaaccctggaagtggaagttgcagtaagccgagatcccaccactgtactacagtctggatgagaaagcaagtctccatcttgagaaaaaaaaaaaatttaaaaattaaaaaagaaaaagcctatggtaattgaagcccaaggatatgttctactctaatgtgttgtcccttttattcttaccaacaggacaaagcccgagcaaagaaagccatgttgtctgaacaaaatagggcttctcctctccccagtgggctcctcaccccgccacagagcggtaagaagcagagcagcgggccggaaatggcgtgaccaccccatccttctccaccaaagacagttgcgcgcctgctccacgttctcttctgtctgttgcagcggaggcgtgcgtttgcttttacagatatctgaatggaagagtgtttcttccacaacagaagtatttctgtggatggcatcaaacagggcaaagtgttttttattgaatgcttataggttttttttaaataagtgggtcaagtacaccagccacctccagacaccagtgcgtgctcccgatgctgctatggaaggtgctacttgacctaagggactcccacaacaacaaaagcttgaagctgtggagggccacggtggcgtggctctcctcgcaggtgttctgggctccgttgtaccaagtggagcaggtggttgcgggcaagcgttgtgcagagcccatagccagctgggcagggggctgccctctccacattatcagttgacagtgtacaatgcctttgatgaactgttttgtaagtgctgctatatctatccattttttaataaagataatactgtttttgagacagctggttttatgagctatgtctggtaacttaaggtagcagtcagctttaattgtggttatatcaacttctgttttttgacttcatacttcttgaggctcaagtctttcttttttttttttttttttttttttttttttgagacagggacagggtctcgctctgtcaccaaggctggagtgcaggggcacaatcttggctcactgcagcctctgcctcccgggtttaagcgattctcctgcctcagcctcctaagtagctgggactacaggcgtgtgccaccacacccagctaatttttgtatttttagtggagatggggttttgccatgttggccaggctggtctcaaactcctgacctcaggtgatctgcccatctcagccttccaaagtgctgggattacaggtgtgagccaccacacccagccttgagtcttaactcttttggtcaaatacatttttcaatgtatttgatggaaaggaaactttagacgtgggcttcaggtgcagcctgtctgcctcctggtgccccctgagctggaagtgaggagtccacctggtatttgtctcaccacgccctgcactggtggctgctcacaccaggtttgttggccatcagtagtagtagtgatgaggtaatgtccacaccgaagaggattcctaggtgtaacttccttcctaggactggttaaaggccataaggaatctggaattagcatgatttaatgcttttttttttttccccttaccgaaatcttagcctaaagaataagtgaatttttatttggagaacttttaacatagtagcctaaaactgcttttaagaagaaaatgaggctgggtgcggtggctcatgcctgtaatcctagcactttgggaggccaaggtgggcggatcacaaggtcaggaaatcgagaccatcctggctaacagtgaaactccgtctctactaaaaatagaaaaattagccaggcatggtggcgggcacctgtagtcccagctacctaggaggctgaggcaggagaatggcatgaacccaggaggcggagcttgcagtgtgctgagatcgcgccaccactccagcctgggcaacagagcgagactgtctcaaaaaaaaaaaaaaggaaaagaagaaaatgtggctgggcgtgtggctcacgcttgtaatcctagcactttgggaggctgagttgggcagatcacttgaggtcaggagttggagaccagcctacccaacatggtgaaaccccatctgtagtaaaaatgcaaaaattaaggctgggcatggtggttcacgcctgtaatcccagcactttgggacccaaggcaggcagatcacctgaggttgggaattcaagaccagcctgaccaacatggaaaaaccccatctctactaaaaatacaaaattagctgggtgtagtggcacatgtttataatcccagctactcgggaggctgaggcaggagaatcccttgaacccgggaggcagaggttgcagtgagccgagattgcaccactgcactccagcctgggcaacaagagcaaaactccatctcaaaaaaaaagaaaagaaaagaaaattagccaggcgtggtggcacacatctgtaatcccagctagtggggtggctgaggcaggagaatcacttgaaccaggaggcagcagttgcagtgagccgagatcgtgccactgcactccagcctgggtgacggagtgagactctatctcataaaaaaaaaaaaaaaaaaaaaaagtcagggcgcagtggctcacgcctgtaatcccagcactttgggaggccgaggtgggcggatcacctgaggttgggagtacaaaacaagcctgaccaacatggagaaaccccatttctactaaaaatacaaaaaaaaaaaaaaaaattagccaggtgtggtggcacatgcttataatcctagctactcgtgaggctgaggcaggagaatcgcttgaatctgggaggcggaggttgcggtgagctgagatcgcatcattgcactccagtctgggcaacaagagcaaaactccatctcaaaaaaaaaaaaaaaaatgcgaagtagagtcatatgtcagctgagcgcatgatgcagcctgttcgctgagcactgatggagtcaccaagtgccttgctaatcattgctgcccacttacaggcctcgtgtacagctcatgtgacctttgtttttgtacttttagtagagacggcggttcaccatgttggccaggctggtctcgaactcctgacctcgtgatctgcccacctcagcctcccaaagtgttgggattacaggcgtgagccaccacgtctggccgctcacatgattttttttttttttttttttttttttgagagggagtctcgctctgtcacctaggctggagtgcagtggcacaatcttggctcaccgcaacctccaccttccccctgttcaagattctcccacctaagtctcccaagtagctgagattacaggtgcccgccaccacacccggctgatttttgtatttttagtagagatggggtttcatcatgttggccaggctggtcttgaactcctgacctcaggtgatctgcctgcctcggcctcccaaagtgctgggattgcaggcgtgagccaccgcatccggccactcacatgactttttactgaacattcttcaaatggtggtcttttggagtcttgtgtttgactaacagtgcttcatcacgtgtgctagtgcatacaaggaagggtgaatgaacaaataaatactgcttattttcaacttggtattttatctcatttggcaaaaatctaaagaaaaaagcagccatttgaaattcgtaaccatacgcagtgagccaagatggcaccatggcagtacagtctgggcgacagagcaagattccatctcaaaaagaataaaataaaatctgtaaccatatttgtatgaagttggagagactttacttttgacattgatgtagttctggcagatttttttttttttttttttttttgagacggagtctcgctctgttgccaggctgaagtgcagtggcacaatctcggctcactgcaacctccacctaccaagttcaaggcattctccagcctcagcctcctgagtaggtgggactacaggcaggcgccaccacacccagctgattttgtatttttagtagagacggggtttctccatgttggccaggctggtctcgaactcctgacctcaggtgatcctccctcctcggcctcccaaagtgatgggattacaggcatgagcaattgcgccggcttttctggcaagttttatttatttatttatttatttttattttattttatttttttgagatggagtctcactttgtcacccaggttggagggcaatggcgcgatctcagctcactgtaacttctgcctcctgggttcaagcaattctcctgcctcagcctcctgagtagctgggactacaggcgcgtaccaccacacccggctaatttttgtatttttagtaaagacggggtttcaccatgttggccaggctggtctcgaactcctgaccttgtgatccgcccgcctcagcctcccaaagtgctgggattacaggtgtgagccaccgcacccggccctctggcaagttttaatactacagttatcctaataaacgcattgtaaatctacatgtaatggtatttagtcaaatgataggactagccagttatttcttcactttaggcagagatgttctagtcttaaaaagcagtgagtttttggctgggcgtggtggctcacacctgtaatccccacactttgggaggctgagttgggcagatcacttaaagccaggagcttgagacaagccttatctgcaacctttgcttcccaggttcaagtgattatcctgcctcagcctcctgagaagctgggattacaggcacctgcccatgcccggctaatttttttttgtatttttagtagagacggggtttcaccatgttggccaggctggtctcgaactccagaccttgggtaatccacctacctcagcctcccagagtgctgggattacaggcgtaagccaccttgcccggcctacatttagcattttcttttttttttttttttttggagatggagtctcactctgtcacccaggctggagtgcagtggcatgatctcggctcactgcaacctccgcctcccaggttcaagcgattctcctgccttagcctcccgagtagctgagactacaggcacccaccaccacgccctgctgatttttgtagttttagtagagagggggtttcaccatgttggccaggctggtctcgaactcctgacctcaggtgatccacctgccttggcctcccaaagtgctgggattacaggtgtgagccagtgtgcccggcctacatttggcattttgtaagcaaaaagatggcactaaaaaatttctatttccaaagtttcataaatttgagagcttgacacattgaggtaacagcaaatttgaaagtacgtttgaggctaggcacaatggctgaggcctgtaatcccagcatttagggagattcgaggtgggaggatcacttgaagtcaggagatcaagaccagcttggccaacatggtgaaacctcatttctactaaagtacaaaaaattagccaggtgtcgtgctgggcgcctgcagtcccagctactcaggaggctgaggcaggagaatcgcttgaacccagtaggcagacgttgtggtgagctgagatcatgccactgcactccagcctgggtgacacctaaaaaaaaacaaacacatttgaggtaaatattaattcataggtcatttagccacccaccgtattagagagggtgctagaatatgctgaaataagaatgccttatatgtaacttgttggaatgctgtgtttctggaagtcaaagctttttaagtggcagtgttgtcacaggcagctcttaattattggtgctaataaaggctaagtcctgaatgggtaaatgacatccatattaatcaatcatgtctatactcaggaaccctaagagctgctagtaagtagaaatcaaaattcccctgtaagaggagctttttccacttgctagtaatccctgctttggcctctctctcattggctgcaaataccccttgaccaagtcgcttatgttctgctattcagctaaagccagatgaggccacaagagacactggggtgaaaatggcagctcagtcaacttgggtgaacagatgtcctgaggagatgtgttagcaagaaggaccagagaaaggaggtgatgtggcccctgatctaactctcgggttagagatggagaaaaagcgagtgattcaccaaccctggagaccctgaactgtggttgagcagaccatatcctcatatcccgcctcagctcacagaattcacttgcggccaggcacagtggcttatgcctctagtcccagcactttgggaggccaaggtgggcagattgcctgagctcaggagttcaagaccggcctgggcaatatggcaaaactccatctctacaaaaaatttaaaaatttaaatttttttgtggtggcgcatgcctgtagtaccagctacccaggaggctgagatgggagaatcacctgagcctgggaggccgaggctgcagtgagccatgactgtgccactgcactccagcctaagcgtcagagtgagaccctgtctcccaaaaaagaattcacttgctagagtccgccagagttgttgtcatttctctgcccactgtgcctgacgacaacaacaacaaaaaaaccctggtcctcaggtggtgggagtcaagggttttccaatgccgtcttccctgtgtggaacacggacagcttactctttcatgatggttatttggtaccatgtgataaatacatgatgcagaggttcacactgacttttagtttctaaggcaggtagagccatggagccctttaagattcagagcatggcacccaatacgtgtccatcctctaactcagacacaaacgagattggagtttatttgggcaaaattaggctctagctctgagcagggctagagagagaaatcaaatctgataatgtctagtcatatttacccaaccgtgcattttcctaccacatgttccacattttgaaattcaaatcacatttataccttggacattgttagaagactatttttatccctgctgtaatcatctaatttgctgattacaggtctcaaattgccacagagaactcaatttttgaaagaattgtcctgtttgatcaaatatgttattcaagcaatgcagtcatttgttccacaagtttacctgccaggtagagttaaccaggagtaatagcattagaagcctatacttaaaatcaagcattagctaatccgcctgcgacaatagagtcttaaatataatttgctgcagatacttcagttcctgcaccgacagacaattgcagtctgtatccaatgagcacagattttttcctacctcgtcccaattccaaatttaacttcagaagactctaatgtactcagttgcataggcttaccaggtactctttcctgggagcctcacatgggagggcaacactatcctttattcaataaacagcatcccccaccttttaaatcattttcctgatcaatgccaattccaaaagttgtgtggtatctgattatgcagtgcggttcaagtcaaatgctggcttccttggggttggtgagtgaggtgccctcgatggagtccctgctaagtgtacactgccagtcctggagacatgaactcaagggagcctgggagaccggggaagccctggagtccccggagggcactggtatgaaatgaaaaggtggcactctaggagcagagcagcagcaggactcaagctcgggaggtggggctgtggaatgctctccagcagtcacaaaagccctcacaaatagggtagaggaaggccacatcacaaggggcttttgccgtcaactaagatgggtgtggtctcccccgcagcaggaagccggtgtttgtaagacaggagtgacttgctcagagccggtttggaggaagaggttgatgaacaagtacagagttatgtgtctttgtgccgtaagaaaatgactgtgcaagtcgggcgtggtggtgtgcacctgtaatcccagctattgggaggctgagatgggaagtatcgcttgagcccaggggtttgaggctgcagtgaggcatgatcacaccactgtactccagcctgtgcaacagaacgagaccctatctcaaaacaaacaaacaaaaaatcaaaaaagaaaatgaaaatgagtgtgtagtgtgtggaggacaagcaggcaggcaatgaggacattcgtaaaatcagctgcatcaccatcatttctaaatggcgctgcctgcatatctccccaggcccccgtgattctgctcctgtgcccctgcccaggcctctgcctacagtggctggaccccacctcctgcaggagtgcacccctgacgttggcccacactgatgtcatttcttcactgggttctggaggcagttgactcatgtgggaagccggctctgccacttcccagagtggtcttgggctctgtgcttcatttctccaagcttcgtgtttcccagctgtgacctgaggatgacaacatagtgcttcccccatggaaccgaggggagatgaaatgaggtcacgcatagatatgttgagcacagcgcttggcacattaaagagaaacagcaaatgacagctgatccctcttattgccaccactgggttcactgtcactgagctaggctgttctgtgaaggattgagcattctcttttctttttctttttctttttttgggacggagtctcgctctgtctcccaggctggagtgcagcggcatgatctcggcttactgcaacctctgcctcacgggttccagcgattctcctgcctcagcctcccgagtagctgggactacaggcgcccgccaccacgcccggctaattttttgtatttttagcagagacagggtttcactgtgttagccaggatggtctcgatctcctgacctcgtgatccacccgcctcagcctcccaaagtgctgggattacaggcgtgagccaccgcgccgggcaatttttgtatttttaatagagaacggggtttcgccatgttggccaggctgggctcgaactcctgaccttaggtgatccgcccacctcagcctcccaaagtgatgggattacaggcataagccaccatgcctggccaagcattttcttttttaagagagagggtcttgctctgtcatcaggttggagtgccgtggcacaatcatagctcactgcagcctcgacctcctagacccaagagatcctcccgcctcagcttccagagtagctgggactacaggtgcacaccaccatgccctactagttttaagttttttttgtagagatgggggaatctcactatgtggcccaggcacgccttgaactcctggcctccagtggtcctcccgccttggccacccaaaatgctgtggctacaggcgtgagccactgtgcccggctgagtttagcactggggacgtgttctagccctacagacagccctggtagggcactgaggtggggacttaccggctgccctgtgtgccttgcgcagcccagggcacagcagtgaggactccaggaatgcctgggagcttgtgcaagcgagcccttagcctccttagcctctccccttgggcccgcccctgtgtcttctccaggcttccacccccctccctctcccaacttcccaacttgtcttccttctgttttttgttttttgtttttttttgagatggagtctcactctgtcacccaggctggagtgcagtggcataatctcagctcactccaacctccacctctcaggttgaagccattctcccccacgtagctgggactataggcacacaccaccgcgcccagctaatttttgtatttttagtagagacggagtttcatcatgttggtcaggctggtctcgaactcctgacgtcaagtgatctgcctgcctcagcctcccaaagtgttgggattacggtgtgagccatcgcacccagccgccacttcttttcctgggcagcccctttgaaagtgtcatctacactcactgtcactccctcttggaccctctccagttggcgtcgccacaccacacagtgccctcaacaaggccacctaagacctctgtgggacaaatctcacagtatgcgtctgccttcctctcccaaggcacctctgccacacttcgctctgctgacccctctttccctctggaaacttcagtgccagctcccccccgcccccacgcaccaagcatcatccctcccaggcagctcctctctgctccagcataaggtggaggacccgcagattcatcccggccaccgccgcccccttgacatttgtccctgggcaacctcaccacctggaagactttgccactgcctctgtgccggcctcacccaagcagggggtctctaccccaatgaggcctgccctggctgcacacctgaatgcccacttgcctgcagggggcctccacctgcgcccttcaccaccttctagaaaaactccttatttcaccttccattgttcatgctattacgaaaaatgggaactggcaatacacaatcaacatgaaggtgactcaatccgcaagtcatcggggaaatgcaaaataaaacaatgagataatttcacagccaccaggttggcaaaaattttaaagtacaaagaacaatacaaatgaatagctgtggatccatcatccatatttgcctacttggcttcatatcatgttttaaagaagaaatacaacatttgagtatgcagcagtttgtcaaaagaaaaaaactaaaaaaggaaatacaatattgtagacatagatgaagatcccctcatgttcctcctcagctgaaacaactccccaaggtggatgtatatgatgcccatacatatttttagacttttaccatttatttttggatccagaagcaataaatagacttatagcaaatactgctttgggtgtttaaaaaattacctacatttggtggaaggaagaaaaagaaatagtaaaaaaacaaaaaaagaaaaaaagaaaataagtggaatcaaactttacatatcacaatatcacttgctattttctttcaatgttattttcttttctttctttctttcttttttttttttttttcttttttgacatagagtctcgccctgttgcctaggctggagtgcagtggcgcaatctcagctcattgcaacctccacctaccaggttcaagtgattctcctgcctcagcctcctgagtagctgggactacaggtgcccaccatcatgcccagctaatttttgtatttttagtggagacggggttttgctatgttggccaggctggcctcgaactctttacctcaggtgatctgcttgcctcagtctcccaaaatgctgggattacaggtgtgagccaccgtgcctggcctcagtgttattttcaagatttacctatgttgatccacgtagggttgagtttattcttttgaaatggtggtagaattttcccctgtgtgaatgttccacaatagatatgctccctgccaccctggtccacaagtaggtttctgattttttcaccatcacaaacagtgttgcaattggcatcttgtgcacattggtgccacttacctggattcctttagggcacattcctagatgtaggattgccacgtcaaagggcgtgtgcctgtgcaccttaactagatgtggtcagtgacttcctcaaactgcaccaatctccgcttcccgccagggagtgtgagagctcctgcctctccacccttgctccagtactcagtatcgtcaacttctcttcccattaaaattgctagtatttaactttattggtttttctctggctatgaaagtaaagcttgtttgttataataaatcagaatactacaaacacgtacaacatagaaactgatgattccccagagatgccgttcttaagagttggagtgttaaaacagtgtacattgctctagaattcttttcaatgcacacgctaacacatgagtgaatgaaaatatttgctgtttttctacagggcggtttcattcagttatatcatcactaagtagtttaaaatgcatatgcacatacaaactcactccttttctgttgttatttctcagtgatgacttgccaattgattccattgccttcctggcacaaaatagctgctcagtaaatacctgctccatggatggatggatggatggatggatggatggacggacgcacggatggacggacagacagacggatggattgatggacgaacggacggatggatggattcttacatttatagccactttcttacattttcatgcccaggagactatagactatcttctacttgcaaaagaccaaaagattgcataagattagaaagcgagacattaacagaaattaatcaagcccctgtccaggttctagtccttttttgagcaaaggtgccatacaccacggaatcccagttcctggcggggttaccgggggcatggcatccaacagcccagtctgcaatgcaccattagacacacagacaaatccatcccctctactttggggcagcactgtgatgaaccatccttgggatactgtcccttttttaaaaggaaaaaaatccaaagttagtatgttccagcagtcacagcctgagtcatccatccagaaagctctctgtgctcctcttgctaagcccctgagttatctcttgttatagacaagtaatgaacatccaagctctgtaagatggttacttggtctgaagcattccctccttcttaaaaaaaaaaagttttatttattttattttttacatctcttattatttatttatttattttttggtagagatgggctctcactatgtggcccaggctggtcttgaactcctggcctcaaatgatcctcctgcctcagcctcccaaagtgctgggattacaggtatgagccaccatacccagtcagaagggttgcctttgaagttctgcatcttccatccctcttctaagctgtaggggattcgccccagcattcagggctaatgtagaggctgcacgttggggcctgcaggtcaggtgggttgtgctggggctgccgagtcatttcaaaacacttgaggcaatattgaaaacctggaaagttcacattcagatacagctccccagctctgggcagccctgcaggcagggcatgtggtctgcaatataccagaatcctcaccacctctaccacaccctacgctaaggtctcagactccattgctgtttaccttcacaaacgcactgcacatcttcttggagtagacaaatatttcttgtaactgtgactatcaaaagtgagaaaacagctttgagtgcagtggcccacatctgtaatcccagcactttgggaggctgatgcaggaggatcacttaaggacaggagttcaagaccagcctggacaacatagtgagacactgtctctacaaaaaaattaaaaattagccgggcatgatgactcatatctgtaatcccagcactttggtaggccgaggagggcggatcattagagcccaggagttcgagaccagcctaggtgacatagcaagaccccgtgtctttaaaaaacaaaacaaaagtgagaaaactgtgtagatcaagaaggtggagtgtttcaagaagaatggcagagagggaacatttcttctagaaatgcagactacttgagcatgtttaatattcaatacaaagatgtcttggtgtccaaagacatcttcttttatgggcctggctcccataggcacctgagtttgagattcctggatttataggagtctcggctctgaccccaaggtcctgtggggctttcagcttgtcccttacttactatgggcctcaatttcctcatctgcccaatgaacaccatctctactaaaaatacaaaaattatctgggcatggtggtgcgtgcctataatccagcaactcaggaggctgaggcaggagaatcacttgaacccaggaagtcagaggttgcagtgagctgagatctcaccactgtactctagcctggcgacagagtgagactctgtctcaaaaaaaaaagttgctttctgtttctcttccaactcttgtcttccaggtggtgatggaagactagtttggggatgttttcaggtttgcaatcatacttcagggaactcccctgcttcctgtcatgcaaaggagctttcatttctctagatgtcagggtgggtgggtgtgagagagacagtgggcaggaccaaagtcaaactagcaagcaggtgggcgagaagctgccaggggcagagagaagcccgcagcctccaccccacaccttacttctattccctaggcctcctggtgatccctgaggtgacctttggccctcagtccctctaaggcacatcaaggccggaggtgaggcaggtgtgattccagggccgctgccgggaaatagttcccccacacccatcaaagcctggtgcctgaaaggtaactggttgtctggtggctctggagagagagatccaaggtgggaaggcgctcaggcctcccaaaaaagcttccagcactgaggcggactttgctcttccttgaagggaaccctgcactgtgctcccgggaaaccccctctctgattccaccactgtgatggagaaaactgaggctgcagaagaaaaattgcagctgcagaagatgagtgtacagatcccaggagtgatttttccacactgttcatctccgtgctatccagggcagctgaaaaggatggctcatctgcggcttgagatagatgcagacgtcaataaggaattcacggaaacacaaaaggcgggctgggtggcttttattaattatatttcttctatcttcaaaacaataacacatcagtaatctacgttgaatgagcccaattgatgccaatgatttctttttttctttctccttttttttttttttttttttgtgagacaggttcttggtctgtcgtcaaggctggagtgcagtggcacgatctcagctcactgcaacctccacctcccgggttcaagtgattctcatgtctcagcctcctgagtagctgggattacaggcacccgccaccacacccagctaatttttgtattgttagtagagacagggtttcaccatgttggccaggctggtctcgaactcctgacctcaggtgattcacctgcctcagcctcccaaagtgcagggattacaggcgtgagccaccatgtccagcagtgatgccaatgattttatccttttgtttctgttggagggaaaaaagaaaaaaggtctgtctgcccaagctagtcagccctcgcatgagcctggagatcagcaaagccctagaagcccttaccagggccccctcactgccatttttgcatcctggctctccctggcaatgcccacagcagtcctgcctggcagtgcccatctgctgtgtccccagccaccgtcccctctcctgcgttcttctttgctatagtcccacgtagaggagttctgacctcagtattgagtcctctctttgggtggaggtagaggcagggtatgtgtgtattgggggtctggggggcagtgtttagaaactgaggacccctcttggtgcacctcaaatcacattcctcacctaacggttatttctgaagaaagaaaagaaataatcggttctagattgctttcttcctacaatccttatctattatcattagatttcactgtttggcacacattagaaaagggtatgtgtacggtggggcacacagcaacggctgaaagactcacagattatttgcccgcttctgtcatcactctccacccccagatcctagggtgaactgtcagggatggcatcgaacagtttccaaacttaaatgtgctaaacctcagtatcctttcctcctcctcctccgtgccaccccagaacaggcggtggctgcacatctggcccaggaaagaggcactgagaaaagcattcaggcaatatacaaatgagagagacaggtgcatacacctgacatttgttattatttggatacaaacgtcattagcatgtgagcttcaaacagccgctaaagtctgggctctgtgcagcctccgcacctagatttcaccaaaaggcgctttcagaatggggttgggatgacctttcctggacccacttcaccaggtagccctggtttgtgaaaatgacctagataaggctgggcgcagtggctcacgcctgtaatctcagaattttgggaggccaacgtgggtggatcacttgaggccaggagttcgagactaggctggccaacatggtgaaaccccgtgtctactaaaaatacaaaaattagctgggcatgatggcacacgcctgtagtcccagctacttgggaggctgaggcaggaaaatcgcttgaatctgggaggtggaaattgcagtaagctgagatcgtgccactgcactccagcctgggtgacagagtgagactctgtctcaaagaaaaaaaaatgtcctaatggggtcccaactcagccacctccacctgcaactcaggcagttctggaatttccatgcagggggctcgagggtgacctgcaattaaaaatgggggtcacaggcagatacccaggatgagtctgcaactgtgtgttgactgagataatttggagcgaaccaatggcgacaacagagggtgtcagagtcccccctacccccatctcccgcactgccaaccttcttctcttccttcttctcctcaacccccactgggctttctgccctccagaccacctcctcccagacactaggggctgatttgcacagctggtggtcgaggcccctcctggcatccttggtggatccaacactgagtaaagttgccgaggcgagtagcgatgctctggtggaaggctccacatgcacattcaccccgaacagctgctggaaactggcacactctgctgctgtagaaattatcagcactgccacctcagctcctggagaaagtctcggtgtgacagcctgcaaagtaatcctgcatttgaatttcactgacaaatcctggcttcctccagacaagctccaacctgcacagatggcccctcgcatcaaaaagtaaaaataacaaagcttgcaattctgggcctccctttttctctgggcagatgtgctggctgcacatttcgggaatcgcgcggtctgagttccagcagcaacctctctcctcctgtacgctcgcactcgccccttctggcgtgctgctggggagcggccgtggcccctccgagtgtgttcagggaagtgtctgggatgcctgagccttttgagtgggagagaaagacccagaggggagagagtgtgaaaattcatcccccactcaagattagccatgttgtcatccataagacagctggcccagggaaggggttgcagcgttggagaaaggtctcaggtaaggtggtcagcagaggtgggggatgaggggcggctgcgctaagggccagccagtgcatgccaagtgcaggcggcagagtgggagatgaagctctagaagtttctgattttttgcttttttttccccaatcagatgcatcagaaggactgattttcttgcccaggctcatcctgaactcctggctcaagcaattctgtcaccttggcctcccaaaatgctgcgtttacaggcgtgtgctcctgatttttttgaatcccccaaaccttgaccagccacagaattctctccactcatatttgctgagaacctctggggatatccaggccctagggatatggttatggatgagacagacccagagagcacaggctcagggaacacacagccaaggccatctgtgagctgggtggccacagactcactgctcaggaatgccagagcaggaggccaagggagaggccagagacagggacctgcagctggcgacattgcgggagccacttacccgcaggtaggtttcacctttgatgagccatctgacctggagccaccaaggctcatccagaaatggtggctaaagtctttgctctactagagggtcagatgagataagatgttcagctgcaaggaaaagacaactcaaagtgccaggagaaaacaaggaattcatggattcgtatgaatgtatggattcaaacgaatggcccaggggcctatctagcctcaggcatggctggatcagggtgtttacattgctgtcctcaggaatccttgcctcagctctgaaagctgactgtgccgactttgttctccacgtggcatttgccagtagagaacagtgtctccaggcagatattcctcccagcaagtacctcctacccagactctccagcaaaagtcctggggatgcttctcattggtccagcttgggtcacatgcccatcccttctctaatcactgtggccagaggaatgcagtgctgtgattagccaggcatgtgtcaggtgtcagtctctggggcagagttggaataggtccatctgaactacctggctctgcagaaaaggggaagggatgctgggttggcaaaagcagcaagtacagaaacaataaagactctcccaaagcatgggtgactgcagagatgggagcatgctctggaacagctgcaaaaatcctgcttcccacagcaggattcttcttgctgcagttgtgtggccactgtcattcatcccctcagcgtctctaattccagcgtgctggcctctgtgccaggcccgggatatggggaaggttccgcatgaccgtgtggggaagcctgcctgccacctggcctcaggggtgggagcagccccctggggacttttcgcagttgaggtctgcctcacccctaaggcccctagtttccctctctggtgtctcttagatctccctgtgtttggatttccattttcctcttccttaaaccaacaccgtaaggtccaaccttcaggaccctgaccctggagagaaaaaaacagagaccaggaaggtcttcactagccaaagccccaggtctgggcttctcatgcacaaagcctctgtctgccacccacaaacccattcggggtagagttgccctcttgtagtggaataaaggacaagtgtggccaaacttgtttggctcttggtcctgggccgggggtggaggggagaaaacaggcattatcagagaagggcatgctgaggctggccagggggtatgtgaactgggagggggccagctggggagctcagcttccaggcccccacccaggcctatgtcgctgctctgatgtgtctcagtgagtgcaccgggcaagacgctgtttgaaggagcttccgtggaaacatccataaaactaaccttgagggaagaactgccgccctggctttactcctgtttagtcatttcattttctcacaatcctatggggtgggaatgatcactggccccattttagagaagaggaaactgagaaacagggaggtcctgcaacttgcccaaggtcccgcaacttgcgcaaggtcccacatggggcctggcttcagggcctgtgacaagacactgcatgagaagcccggggctggttgataggacttctcattaaccagctcataggactcccaaaatccaactgagggttggggcccagtcatcagcttttggggtttctggccctggggtggccctggccacataggcctgcatagggcatgcgttgccccgctgaagctcggcagcttagctcttctgccgggacaagcgcttcctaggaattctgagcacttctgccccctcccaggggcccctcccaggcctcctccgccgccagtccgggctgacagcttggctggccccaggctggggccgactctgaatgcggcgcctcctggtcacgcggcatgggcagaggaggaggaggaaaagggagaggaagaggaggaggggagaggagggaggccggcctgggtagaagtcagctccagctcctggaaggagcccacgcgtgctctagacgccttccctgcacggggctctgcccatcccccacctctgggaggagacagggtggccccggaggagggggcggcagtccggtgagcagcgacttggggcccgaggccccggccagttccattctcaccacgcccggcggaagctatcgccacgatttggggagggccgcctctgagcctcctctggaggcggcacctctgctactccattgcacaaacggggaaaccagccccgccgagcgtaccaggccaggccggccctgaggggcaggggcaggacgccaggagctgacccccagcgtccccgactgccagtgcccctgtcatgcaggccgaggccaaagcacgaaggggcctcgctgcaaaaggtcggacctgcgttgcaccggtttccagccaagtgctttgggcaagtttcttaaccgccttggcctccactttccccttctgtgaaataggatggtgcccacctgacagggttatcatgttcccttgggcagggcctggcaggctgagccaacgtcagtgtttgcgtggctagtttggttttattttttacgtattgttttggagacaaggtctctgtcacccaggctgcagtgcagtggtgcgatcagcgctcactgcagcttcgaactcccaagctcaagcgatcctcccacctcagcctcccaagtagctgggattacaggtgggcaccatcacacccagcaacattttttattattttttgtaccaatgagatctcctgtgttgctcaggctggtctggaacccctggccaacagcgatcctcctgccttggcctcccacagcgctggcctattaacgttttaacagaatgaactgaggctcagctgggccaacgcggaccccggcctgcgcccacgcctcaccggctccccagggcctgggaccggcacagcccgggctcaagggctgggactgccgccccgccctagagctcaggctgcgctccacgtgcgccgtgtttacccacgtgatgcgctgccccgccccgccccgccccgcgtctccccgccccgcgtctcccgcgccgcgcgtctgcagcctggccaaggcggatgctgggggttgggggcccgagcgcggcctcacgtcgcccggacgccccccgccccacccgggagactggagcgagccacggcctccctgggcgggcttggcccagccactccgctgtgtccgcgctgccagggcgcgggagcacttccgggcgcgcgccgcgggaggggcagggccgaagaggtgggggcggggccgaagagttaggggcggggccggagaggtaggggcggggccggagaggtaggggcggggccggagaggtaggggcggggccgccccttgcgggggggttctgagcggcccgcaccgcaaaaggcggtgtcagggcggtgaggggcggggcctggcaatgcacaggggctcttaggggcccgcactgcgggaggggcagggccagggcggttggtggactgggcctggctgtacgtaggtgctctgagaagcccccggcgagaggggcggggccagagcaacagtgggcggggacaggctgtgcgtcggagctccgcggggcctgcggcggggtgggtggggccagggcggcggtgggcgggccgtgctgtgcgtaggggcgctgagaggcccgcaatgtgagaggggcggggccggaacagcggtggacggggtctgtagttcaactgtgccgtggcgtcttcttcgcggcgagatctgagtgcctcgcagcagccgaaggcgggtttgcaggttgcgttgcgctggccctgccctcggcaggcagaacgggatagagcgcggacaggcgccgtcactcccagattcctctgcgtccatggcagagccactcctccttggtactccttccttgacccaccggggcccccttcctgctgtctctgcccctctagctgctgcctccaggggcttaggtctcggcccctttggcttctgggctgcccctggcagatctcgtccatcctaggttttaacgcctacctgcatgcggatgatcctgatagttctaacagtagctaaactgttttccacgtgctttctgaacattgatgctgtttggacccctgacagccacatttttacgcccccgcgcagcccgctgctctgagctccgtattccccgccggccgggtgttccacggcccttctgagtcaacgtgtgtgcagtgaagtccttcttccttctcgtttcaccctgggtctcctcctcagggagtggcatcacggtctgctcagtggcaggcaagccccagatagcgcttccgtcttgactcctcactctcctccctctgatctgtcccagaatcccatcagttcttcctccaccccacccgacccacaattctctgctacacttgtctccacggccctggtctgaaacacatgatgcttcacctggactcgtaggcgaccgatctttctgcctcttggcttactactcttaagtctcgccttcacgggcagtcgcagggatctttctcaagatctaatttctaatgattgcatttttcttctttaagcagtaggctgaaagccaaagctctccatctttttacaactcaaaaaaaaaaaaacaagggtgccctctgtctggccttgccactgttcaacctggtacttgcaagtcttgtccagtgcaatgggatgagaaaagtgagtgatagaaggatcggaagcaaaatgaaagcactgttattgtcaagtgatgatcatcgacatagaaaacaagaatcaacagaaaaattaacctaatgagagagttgcacaaaggtagtttaaggtcagaatagggccaggtgtggaggctcacgcctgtaatcccaacactgtgggaggctgaggcaggaggattgcatgaggccaggagttcaagaccagcctgggcaacatagtgagaccctcttcttttttttttttcttttttttgagacggagtcttgctctgtcacgcaggctggagtgcagtggcacaatctcagctcactgcaagctctgcctcccgggttcacaccattctcctgcctcagcctcccgagttgctggggctacaggcacccgccaccatgcccagctaattttttgtatttttagtagaggcggggtttcaccatgttagccaggatggtgtcgatatcctgacctcgtgatccgcccacctcggcctcccatagtgctgggattacacgcgtgagccaccgcgcccggccaaccctcttctattaaagatcagaggctgggtgcggtggctcacacctgtaatcccagcactttgggaggccaaggagggcggaccacttgaggtcaggagttcgaaaccagcctggccaacgtggtgaaaccctatctctactaaaaatacaaaaaatattcgggcatggtggcgtgtgcctgtaatcctggctactggggaggctgaggcaagagaatcgcttgaacgtgggatgcagagttgcagtgagccgagatcacaccactgcactccagcctgggctacagagtgaaactctgtctcaataataataataataaaggtcagaatataaagtcagtaatgggttcctccccaaaaataatacacgtattgtgagtaataaaaataaggtattctgcatgatactgaaatatttatgcattaacctaataaaaaaatgcacagaatctttaaggagaaaaacctgaaattctaatatatagattttgtttaaaaaggcttgaatacataaatagtgagataatgtcttaaccttgaaggaatgtaaattttctgttacatgatctaactatgcattgcaatttcagtaaaaattccagcccaattattttggaacttgagaaacttgattcttaacttttaaggaagaataaaaatccatgatctgctaagacaatcttgaaagaggacaaagggaactcttattcaacaggcattaaaacggattacaaaggcatagtaattaaaataaggtgatattggtacagaaaaacaggtaagtggaatagtttggagagtacagcataaactcagttatatatggtaacatataatatttctgtgataggaagggatttctcatgacctccaaatcataagctgaaaggtgagacgtgatggattttgactacaccaaaatgaaaaaatgttgctttgctacagacaaaattaacatatgagtgataagctagaagatattatccatgttttaaatgaacaaaaggctataactagaatacacaaggagcttctgaaaatcagcacaaaagagaaagagataggaaaccgaatttaaaaaataatgggcagccgggtgcggtggctcatgcctgtaatcccagcactttgggaggccaaggcgggcagatcatttgaggtcaggagttcgagaccagcctggtcaacatgatgaaaccctgtctctactaaaaatacaaaaaaaaaaaaaaaaaaaaaaatgaaccgggggtgtggtggtgtgcacctgtaatcccagctgctctggaggctgaggcacaagaatcgcttgaacccaggaggcggaggttgcaataagctgagatggcgccaatgcactccagcctgggtgacatggtgagaccctgtctcaaaataataataataatagtaatgataatgggccagatatatatatgccgttcacagaaagaaaaatcagaatgactgaggtatccagagaggctcattctcactggcagtcagaagaaggcaaggggaaggaatgagatgtcacattgccccacgagctgatacaactcagcaagccagatgatgtgaagtgctggcgtggatggatgagagagggagtcccatgcacttgtgagtgagtgtgtggccagttacagtgaaattaaatacgtgtatacttttgcagagctaggaccagggagaggaagggaggtgcttgggcacacacgtaaggaagcacttactgtcagggtcgaccccaccccttataaagccctgaaagtgagggctttcttagtttttttgtttgtttttgagacagagtcttgctctgtcacccagcctggattgcagtggtgtgatctcggttcactgcaacctctgcctccagggttcaagtgattctcatgctttagcctccggagtagctgggattacaggcgtgcatcacaccgagctaatttttgtatttttagtagagaccgggtttcaccatgttggccaggctggtctagaactcctgacctcaggtgattctcctgcctcagcctcccaaagtgctgggatagcaggcttgagccaccgcaccgggtctgttcttaaattttataccttaggtgccgcattgccttgccctaggcccagccctgtacgttccgcacagtttcactcttggttatgtacctaaagagacttcatcagaggtccacagcgttgcttatgacgtaggtatcccccagagggacctggacaggtagaacttggtacatgaagacaatgacaagtatttttacagagggcagggattccctagcgcttggcctctgggaaggagtttggggaacttggtgaaagacagctgagagcaaaatacaaaatgactttgttccagcttctcagaagtgagaccagagatgacatttgcatctgccttggagcgttttgtagatttctgagcctttgtcactgatcctcctgccttgcccccaataaatgcctttgaatttaggtagaaagaaagttggaagacgcccgcagggtgtctaagaagggttaggcatattttcactatgcctataaggaagcagaggtcagataaggaggcagaaactggagaattccagatcctgctcctctgtcaaggcagaaaggatttagagggcacagcttggactttggagtttacatatattccattcccttttctactctctagagatgagaacttgggcaggaaacccagccacagtgaactttggtgttcttcccagtgagatgggaataataataaggcctaactcagaattggtgttaggagtcaaaggagaaaggatatctgaaaccacttatcttcctccctcctcttctgtcaaacagcatagacaaatggagattccctgactttaaaaacaaaacaaaacatttttcagtcatgggacagcagtctaggggcctttaggaagaaactgaggaccaaaggatgcaactgagtactgtcagctcaagtggcaaatgaagtcatcagctccaggtagttcaagtcccagccccacctggctttgaggtgaggttgtgctttgagccggtaccattttggatgttgctcagctctggaatgagaggtggggtaggaagggtgtgatggttaattttaggtgtcaacctcactgggtaggagaagcccagaaagctggggaaacactgtttctgtgtatgcctgtgagattgtttctggaagagactagcattagaatcaagagactgagtaaaggaagtgtgccctcaccaatgtgggcaagcatcatccaatctattgaggacccagatagaacaaaaatgcagaggaagggtgaattctctctccttgagctgagacatccatctttagttcccggacatcagacattggagttcctggttcacaggccttcacgctctttgttgaaagaatttttttttttttttgagatggagcctcactctgtcacccaagccggagtgcagtggcacgatctcagctcactgcaacctctgcctcctgggttcaagcgatcttctgcctcagcctccccagtagctgggattactggcacctgccactgcacccaactaatttttgtatttttagtagagacggggtttcaccatattcgccaggctagtcttgaactcttgacctcagatgatctgcccatcactgcctcccaaagcgctgggattacaggcatgagccaccacacccagcctgttgaaagaaattaaggaagacctaaataaatggagatatacatctataccatgttcatgaattggaagacttggtattgttaaaatgtcagttcttcccaaattgatctatagcttcagtgcaatggtgagagttacaccattggcttcctgggttctcaggactttggacatagactgaattaccccattgtctttcctggatctccaactcacagatagcaggtcatgggacttctcagcctccataactgcatgagccaattcccataataaatctcctctttttttttttcttttttttgagatggagtttctctctgttgtccaggctggagtgcagtggcgcagtctcggctcactgcaacctctgcctcccaggttcaagcaattctcctgcctcagcctcccgagtaactgggactataggcgtgcgccaccacggccagctaattttgtatttttagtagcgatggggtttcaccatgttggtcaggctggtcttgaactcctgacctcagatgttcctcctgcctcagcctcccaaagtgctggtattacaggtgggagccaccatgcccggccccatactactttgattagtatagctttataataaatcttgaaatcaagtagtgaaagttctccaaatttgtctatctttttaaaaaatagctttagccattttaaatcttttgcatgttctctctctcttttttttttttttttttttttgacagaacgaagctgtaatgcattctcatttaaattttaacatcagcttgtcatatgctaccaacaaagcctgctgggatatagattgggattgcactgaagctgtagatcaatttgggaagagctacattttaaaaatattgagtcttccaattcatgaacatggtatagatgtatatctccacttatttaggtcttccttaattaattaattaattaaccttgtttctttttatgagatggagtatcactctgttgcccaggctagagtgcagtggcacgatttgtgctcactgcaaccccctcctcctgggttcacacaattctcctgccttggcctcctgagtagctgggattataggtgtgtgccaccacacctggctaatttttgtatttgtagtagagacgaggttttgccatattgaccaggctggtctcgaactcctgacctcaggtgatccgcccgcctcagtctcccaaagtgctgagattacatgcgtgagccactacccctggcccttcatttctttaaatgatgttttgtatgttttggcataccaatcataaacatattttgttagattcatccctaagaatttcactattgatttatttacttgtttatttttagagttgctgtgtcacccagggtggagtgcagtggcgtgaccatggttccctgcagcctggaggccctgggattcagtgatcctcccacctcagcctccccagtagctgagactatgggcacactccctcatgcctggctgatatttcattcttcaagtgtcattttaaatggtattgattttaaaatttcagtttctagtcacttctatttattttatttttgatacattctttcagattttccacacagatttgaccctggggtttgggtatcagtcacattttcctgtgcccaagagatggggaggatgtttctcaagggaggacttgcacacttgatggggcctcttactctgcaagagcaggatgaacaggggctagtgtggtctggtaactgcgactcaggtggaagcatggctttctcagctgatgcctacaagtgtagatgtctcaactgtaaccagtggatttccacatcagagagcaacaagtcttgtttctcatagtttctagttctctgctgagaatagttgtctttttatacatattgatcagagtttcctttgtattcatctgtgtagttatgagagctgccctaaagttaccatctgctagtttcatcaccacaggtcactttttatgtcgtatccattggttttcttttctctggagtttgggtcttgttttcctgttttcacatgtctggtaattttggattttatcctggatgttgccatgacatgttgcagagactctggactctttatactttaaagagtattggttcttcccccaccccagctttattaaggtatagttgatatataaaaatcatagatatttacaacatgatgggtttttaaaaaaatttttatttttggtttgggggcacatgtgaaggtttgttacacagataaacagggtttattgtacaacaaatgggggtttattatacatattattacatcacccaggtattaagcccagtacccaatagttatctttttttgctcctctcccgcctcccattctccccctcagtgtctgttgtttccttcttctttgtgttcataagttctcatcatttagctcccaacatgatgtttcggtatctgtatacattgtaaaatgattccaccaagttaatcaacatatctaccacctcatatgcttatcgttttttttgtgtgtgtgtggtgagaacgtttaagatctactgtcatagcaatttttaaatatgaagagtattgatttttttgtttaagtaggcaattaacttggctaaacttaacatgtaaactctctctcccctatagaggatgacagttgaaatctgaagttcatttagccttaactgctgcttaatgacttcctcactcatacctgattctggagttggcaagagatttgtgcattttatacatggatttggggactccccttctgtggctctttttttttttttgagatggagtctagctctgttgcccaggctggagtgcagtggcatgatctcggctcactgcaacctctgcctcctgggttcaagtgattctcctgccttgacctcctgagtagctgggattacaggtgccctccaccaggtccagctaatgttcgtaattttagtagagacggagtttcaccatgttggccaggctggtcttgaactcctgacctcgtgatccacccgcctcggcctcccaaagtgctgggattacaagcgtaagccactgcgcatggcttttctctctctttttattttttttttttagaaatttcgccagtcgtttttgttttttgtttttagtttctgtaattacagtgacctttagtttttcaagccagtaagtttgtttgtttgttttttcttttttgagatggaatctcactctgtcacccaggctggagttcagtggctcgatttcagctcactgtaacctccacctcccgggttcaagagattctcctgcctaagcctccctggtagctgggattgcaagcacgcgccatcatgttcggctaatttttgtatttttagtagagatggggtttcaccatgttggccaggctggtctcgaactcctgagctcaagtgatccccccgcctcagcctcccaaagtgctgggattacaggtgtgagccaccgtgcccagcgcaataagacttttctacccaagaatttctatctgagtcctgcatggagtagtcctgaatggctcagatccatcagaagggaaacttgcccagtgctgttctcttctaagtattgattctcctgcagtatctgcctttttgttgctgtctggggacttcagttactgttcggatttgtggctgttagctccggaagggttgatcagatattaggtagttgaccatgacaagagcaggacctctgagcaacgacgctgtcaacagtgccatgactctgttagtccttgaaactcagaaggaggaagagggtggggaggaaagtctaaactggctgaatttaaatctgaaatgactgaacaaagctcaaagtttctgagaaaaccaccatctgactagattgactcttcggccatcgtgtaaaattttcagttatagaatggtagagaaaagtgcattttcccatctacatcttgtggcctgaaaatatcttccctcctgcatataggaaggaaaaaccttgaaaatggtggatgtgggatcggggagaggctggatgaaaagtagttatatcttccaggtactgagttttctcatgcatagaatggtggggttgagggaagtctagaagattccaaagtctgttctcgctcgcacacttacactaagtgctttttacgaacttctgaggccacaaacttctgccctgacaagagtctctccctgtgaaaaaggggtggaagtccagtgctggagatgccttccaaggctgtaggcgcccctccaccgcttctgaggccctgcctctctcaggtcccaggtctctgtcagaggagttttggggcagagccggagctgttgaagggtggggcagccagacattccccagagctctttcctgtccagattcgatcagacctgtggctttttcaggagaggacagtcaggcccttgggcagctgaacctgatcagcttcccttactctaccttatttcttcctttaatatttttatttctttttagaacttcagttcctgtccctgcttaggagaggggagttgtccattagacagaatctacatctaccctagattcttctatcactagttttttttttttcccaagtctagcttagcagtaagctctaaggtcccagcctagcaaggctgctgggagaaagacagcctctttcccaggaattccagcaaaagtctcagggctgagcctcattaatctgtcttcggtcatgtgaccatccctgagccagtcccggaggctggggagatgaagggccctgattggccagccctggtcatggccacccctaaagtcagggccagaggtaactccatcccaatcacctggacagaagggggcttccccaaggatgagggcgggactgttaccaagataagggagatgcatgctgggaggatgaaatcaacagacttccacaacataagtttttctcaaagttccggatccaggattcacgagtgttgcttgccctgtgccaggcacttcctttaccttttgtatctagttattttatcccaagagatcatgttgttccagacagggaactgagcttagaaagaggaagggcctttcccaagccgatggcacagggtctgcacttcctgcctgggaagcaggcctggggcttcccacgtggcctgacccctctcatctgacacctgccccccactccctcccctctgcctgcaaaactgacatgaggagactgcttgtgtttccagaaagaggggaattggcaatagccatgagttgagacgacttgataaaatatttcttgttttctcgagtttacatagaccaagttttcactgttgctatggggtgggttggcagagagatgaaaataaatctgtgtaatttattttttctctgagtggagtatatttctgctggcttcatacacatgcacacacgcgcgcgcacgtgcacacacacatgcccgcacatacaggctttcataaaatacttaaacccctctaatgctctctgtggaaggaataaatatgtactgtactttcaacttgtgttctctgaaataccatatggtctgcactgtgagcttaaaatactctagtgagcggatgctttcatgcagcagatagccaggtggagctctccctgccaatcttacaacgttaattaatcctttaaaatagagcgtggaggggtccctgcgtcagaaacgggtgctgtgtgagggaagtagcccggtggcctgcaccggggctgagcagagagtacaaaggcggtgggaaggtgggctaggccgggagcacccctgctgcctgacggcgcctttgatgagcccgctcagtcactcagatactcacagtttgcattctgcataatcagtctaacaggctgatggtttgcatgaatatctaagtttgtcattgtggttaatttttcctcaaaaagaggccccctatctctctggcccaatgcatatttataaagggcagggaagtcaggcagaggatgctggatgaaggggcggctcagggagggggccccgtggccggtccctgaagcctgggaggccaggctcctgccagagctggtggctcagagaagggtgcagagctcctcagagcctggagggaaggaactgcagggagaggggacagcctggtttgcaaggccccatttgggctagcctcttccctgctccaggcctcagtttccttatccatacaaggagcatgtgggccacttgatccaggcctcagggtcccaaaggaactatcctctccaaatgaggttacacagagtcagagaggggagggagagaggctcacatccattcaacaactttattatttatttatttatctacttttctttgagatggagttttgctcttgtcgcccaggctggagtgcaatggctcaatctcggctcactgcaacctctgcctcccaggttcaagtgattcctgcctcagcctcccgaatagcttgtattacaggcgcccgccaccacgcccagctaattttttgtatttttagtagagacggggtttcactatgttggccaggctggttccaaactcctgacctcaagtgatccacccgccttggcctcccaaagtgctgagattacaggcatgagccaccatgcccttgttaagctgttaagcttacttaacaactttagtggtgtgactccttcccagagcacctgtggtgctccacgaccaagtatttttataggttaaaaactccagttatcttgtaaaaaacgtaattgcattatgttgtatatattttggtgtaaaaagcattaaattgctcgttttaaataggctacggttatttttgttttcttttgtattttgtttttgtgtttgacacagggtcttgctctgtcacccaggttagagtgcagtggtgcaatcatagctcactgcagccttaacctcctgagcccaagcaatcctcccacctctgcctcctgagtggtcatgaccacaggtgtgcaccacaatgccaggctgattttttttttttttgagacagagtgttgctctgttgcccaggctagagtgcagtggcatgatctcggctcactgcaacctacgactccgtggttcaagcaattatcgtgcctcagtctcccgagtagctgggattacaggcatgcaccacacccagctaatttttgtatttttagtagagacagggtttcaccatgttggccaggctggtgtcaaactcctggcctcaagtgatctgcctgcctcggcctcccaaagtgctgggattacaggtgtgaaccactgttccggcctgagccactgtgcctggccctggctaatttttaaattatttgtagagatagggatctctctatgttgctcaggatggttttgatctccagtgctcaagtgattctcctgcctcgacctcccaaagtgccggaattacaggtgtgagttaccgcgcccagccagctatggtttttgtaaccttgttttggcattttttttctgactcgtcaaagaatatttcggcaactttggagtggccaggcttccctttcccatgcgcagcaggaagtccaggtgggaatggggagaggctgggagatccctcaggtcggcggctttcagagctctccaggccacgcctctcagtggccagcaggtggcagttctgagccttccacctggccaccctccttcctccacccccggggtgcccgtccccccagtccacataccacagagtcccaggtggctggagagagctcctggcttccaggccctgggccattctgagaagctggatgaggcagcctagtggccatccagctgcccctgcctgggactgcctgcctaccccttcccatccttggctccatgctaaaggaaggtgggcttcctggaggagctgacatcttaagtgagacctgcaggacaataaaggatttcaggcagagggaacggaatatgcccaaatccagagaatccagaccctgtgctttcaggaactggcaggaggctgatgtggctagaatgcagactgttgggcttgggagagggactagggaggccaggtaatgcttggcactctgggagcagcaggaccagggcagcccgagtctagacattatcttgagggcagtaaggagccctcagcccattctaacccatcagagttggcctccggaaggatcgccatggctgcaaactgcctagcctctcatcgcccctcacccgctgtcactcacacacctgggcctcctaccgtgctggccaggaaagagctgcaagtcctcgggcccgaggctcggcaggcagccgacctaccttgcagtcctcaggagaagctgtccaggaaccccaccctcctgagctcccggggctttggtggggaagggagcctcccagggtcccggagcactaaacaaaaaggagctgaaggtcaccacactttggccatttgcagggagcccttccccacacaggggcggcatgttcccttgtggctgccagggagcccccaacacccctgggaagatggcaggtcgaggggaggggacatggcctgaaaacaaggaagcagtctgcaatggggagatgtggggcatggggctgttttagacagaggaggcggcaggtgcgcgtatgtaggtttgaggtagattttgctacccaggaaatgggctcttgcctcttccacctgcctgtgaactggccctgggacccagcaggagaggctcccctgagtgacttgtgacattcttttttttttttttttttgagataagtctcattctgttgcccaggctggagtgcagtggtgcgatctcagctcactgcaatctccatgtcctgggttcaagcaattctcctgcttcagcctcccgagtagctaggattacagattacagatgtgtgccaccaagcctggctaatttttgtatttttagtagagatagggtttcaccatgttggccaggctggtctcgaactcctgaccccaggcgattcgcctgcatcggcctcccaaagtgctgggattacaggggtaagccaccttccccggccaacacatggtgttctgaaacagcacagcctagtgtaacctcaattggtaattaattaattacactccccaggtgtctcctggagtccttcctgtaggggaggggaggctgaggctgcagaggccccattcagagggctgttgaatgactcatggctgttgagaagtaatgtccactaaataacatctgattctgtatttaacatttaaatatttaattaactaaatgggccaaatatttaatcaagcaccatcaaagccactgtgagcctccactttgcataattccaaggcaggccagcttccctccgagtccccatcctcatcctgacagtgctatcagtgcccctgcctggtgggaaacatacccattctggtacccaattctttttttttcagagacaaaatctcactatattgcccaggctggtttcaatttgcccaggctggtttcaaactcctgcactcaggcaatccgcctgcctcggtctcccaaagcactgggattacaggtgtgagtcactgtacccatccatccgataccacattccgagactcagggcatctcatgtcctaggcaaagttgcttgtttgcttttgttttgttttgtttgtttttgagtcagggtctctctctgctgcctaggctggattgcagtggtgcgatctcggtccattgcaacctctgcgtcctgggctcaagcgattctcctgcctcagcctcctgagtagctgggattacaggcgcgcaccaccatgcctggctaatttttgtatttttagtagagatggggtttcaccatgttgcccaggctggtctccaacttctggcctcaagtgatccgcctgcctcggcctcccaaagtgctgggattacaggtgtgaccaaccgcaccccaccacagttgtttgattagactccaggtttgctatgctggagatagagttccccccatggccaccctttcctctcctctttctctttcctccccaagtagacacaattgagactggctgctgggttcccctggaggcagtgtggtaccagtcttcctgcctctgatgacagattcaggccttgacaacaggggtgaacatgtgacccagtctggaccaatcagaattcttctccaggatttttgtaactggagttaaaggcgggaagacttttttgagctggacttgctctgtcacccaggctggaatgcagtggcacaatcatggctcaccgcagcgtcaacctcctgggctccagtgatcctcttgcctcagcctcctgagtagctgggactataggcaagcaccactgtgcccggctaattttttttatacagacgggatcttactatattcccagagatggtcccatggtgtcctaatctctgcatccagctgttcctgaagatgggcctaccctgatctttctatgggagggcaggtgaaccaataagtgccctatgtctttaagccagtggaaatcagttttctatcacttgtatccaaaagtgccctgaccaatacctactccaccattatagtcatgtagcttatgtgcaaataaaatgacttttaattatttaactgtaaataatacttgtgttagattagtgcaaaatctttgtgcatttacttttcagccaaaaccacaattacttttgcaccaatctaatatctaatagctcatagctcatattcctaccagtaagtttttttgtttttgtttttgttttttttttttttttggagacagagtcttgctctgtcgtctaggctggagtgcagtggcgccatctcagctcactgcaacctcctcctcccgggttcaagcaattctcctgcctcagtctcctgagtagctgggactacaggtgcgcgccaccacacccagctaatttttgtatttttagtagagataggatttcaccatattggccaggctgctctcaaactcctgacctcgtgatctgcccgcctcggcctccaaaagtactgagattactggcgtgagccaccacgcctggcagcaaggtatgtttaggtttccttgaatatgtcctcggctcttcagaatgaagggaggatctgagcctggaaggatgggtccctctgacacctgctatcctgctgatgaggtcagcgtgcttctggaactgctgaatcctggggctctggtgacgtcaccatctctctctccctcttcctctccccccaccatgcctcaccacaccccacctcttcctgggctttgcttttcattatattggcttcgttatcctgcaagtgttcttccagttgtagccccagcagctccaggcttacactgtccttgcgagaaatccctgtggaagagggcagttttttttcccaatagaaccacaaaggtggctaggcgcggtggctcacgcctgtaatcccagcactttgggaggctgaggcgtgtggatcatctgagatcaggagttcgagaccagcctggccaacatggtgaaaccccatctctactagaaatacaaaattagctgggcgtggtggtaggtgcctgtaatcccagctacttgggagtctgaggcaggagaatcgcttgaacccgggaggcggaggttgcagtgagctgagatcgcgccattgcactccagcctgggcaacaagagtgaaactccatctcaaaacaaaaaacaaaaaacaaaaacaaaaaaacccacaaaggtcccaggaaaggctctgattggatagacttgggttatgtgcccattcctgaacaaatcaccgtggccacagggagaatacatgcattggctcagctgagcaacgtgccaggcagagggggaaatggaggaaggagcactgagagaggggtggttccctaggaaaagttcctgtggtgctgttgaccacaggaagagtgaggggagctggccagtccagtgacaccctgcctaggaagcttctctaccctggagacttcaccctgcagagggtgccctctgggtgctagaaatggaggtgggactgctgcaggaggggaggaagcatgaggaatgtgtgtgttccacagtctagagaagcaccagggctatcactgcttatccttccccttgtggcagagagtgggtgggagggtatttctatgcaggcagttatatagtgtggactgaaggggacagggagaaagcaccaagaaagcccttactgtatacaggacagtcactctgagagacttggggcacaattacttactgagctgcccagggaattccctgcattttggccattaccatccaagacttcgtgaatccattttcttgctggtgggagcataaattgttacaaccagccttcacggggggcaacgtggcaacattgattacatttaaaaatgcacagactcccagcactttgagaggccgagatgggcagatcactgaggtcaggagtttgagaccagcctggtcaacatgaggaaatcctgtctctactaaagatacaaaaattagccaggtgtggtggcatgcacctgtaatcccagctattcaggaggctgaagcaggagaatcactttaacttgggaggtggaggttgcagcgagccgagattgcaccactgcactccagcctgggcaacagagtgagattctggctcaaaaaaaatagtaataataggccaggtacagtggctcatgcctgtaatcccagcactttgggaggctgaggcaggcggatcacgaggtcaagatatcgagaccatcctggccaacatggtgaaacaccgtctctactaaaaatacaaaaattagccaggcgtgatggcacacgcctgtaatcccagctactcgggaggctgaagcagcagaatcgcttgaatccgggaggcagaggttgcagtgagctgagatcgcaccactgcactctagcctggcaacagagagactccgtctcaaaaaaaaaatatatatatatatagtaataataaaaataaaaaataaattaaaaaaagaagctccctggcaattctaatgtggcccagaccctctggtccagatttccagcccctgcagaattcctggtctcctcttggctccaccccagcacacaccaaacctggggttcggggtgcggccctttctccttgatttcccctcgaaagtgtccttcccctcctgctgggtgctgggtgaggccagctcacggtggagtgctggggaaggagtagctcaccctcacaaccgcccatgcaggagcccctctctgtcctccccctggaaaagggaacttggcattctgtgtagcactgctggcctcaggaaacctggtgggctgcatgcccgcatggcctgagaggacactgccagcactcagcagaagggtcacgttggccagctcactccctgccagcccctgaagtcgaagctgcctgaaactgcggtgctggtttgccactgccaggagatgccagcagcctaatttacatggctgtccagggtacccccagccatgcgacagccaggaaaactgcaccccatcttagaaaactcaggaacctgagggaggaagtccaaactgaaaaacctcaattagccaggcgtggtggcttgtgtctgtaatcctagctactcagaggctgaggcaggaaaattgcttgaactcgggagatggaggttgcagtgagccgaatcatgacactgcactccagcctgggcgacagagcgagactccatctcaaaaaaaaaaaaagaagaagaagaaaaagaagaagaggaagaagaggaagaggaaaagaagaaggaggagaaggagaaggagaagaagaaggagaagatgatgaggaggaggaagaaaacaaaaaacaatacaaaacaaaacaaaacctgttccaaacagcaggcactgctgaggaaggaaaagaactttcacaaaaaagtaagacagagatgaactggtagttgcatggtcggggaggactatcaggaaccaaaagaatcaaacgacttctctgtttaaaaattcaactgataaacccaggaagggaatgatcactgctgagaaataagttgataccatgagagttcaggtggaaggaaatctcaccgcaatgcaaaaccagaaaaagatttggaggacaaaccctgatgatctaacattcaaaaaagcaaaagagaaggaaaaaaaagatataaagggaaaacgataatcaaataattaatcaaagagcattttcttcctttctttttttttttcagagatggggtcttgctatgttgttcaggcttgagttccatgactattaacatgtgtgattgtagcatactacagcgttgaaactcctgggctcaagcaatcctcctgcctcagcttcccgagtagctgggtccgtaagcacacaccactgtacccagctcctaattaaagaacattttctaagctggcgaaagccttgattaaaagggccgatagagttccaggaaggattaattgaaaagacatatacttaaaacagaccctggtgtaattcctgaattatgaacttccagacagaaagtaaggttacttacaaaggaaagaaaaatcacgttgatgttggctttgtcatctgccaccctggaagtcaggagacgaatggaacagtgacttcagggacaaggacagtgacccaggaatcctatgtccacaagagatatcatgcatacatcagggcaatggcaagagatttttctttttatttttatttgttttgagacagggtctcactctgtcactcaggctggagtgcctggtgtgatcacggctcactgcagcctagactggctgggcttgagcaatcctcccaccttagcctcccaagtagctgggaacacaggtatgtgccactgtgccccactcattattttaattttttttttttttttgtaaagacgggtctcactgtgttgccaaagctggaagagattttaaagtatgcaaagacttatatcctctctggggaaaatgctaaataaatactacagccaaaaacagatacactgggccaggcacggtggctcacatctgtaatcccagcactttgggaagctgaggcaggcggatcacttgaggtcaggagtttgagaccagcctggctgacatggtgaaatcccatctctactaaaaatacaaaaattggcctagtggcaggtgcctttaatcccagctacttgggaggctgagacaggagaatcgcttgaaccctggaggtggagattgcaatgagccgagatctcgccattacactccagcctgggcaatatatccagactccatctcaaaaaaaaaaaaaaaataagtccacaaaccctttgatgatcgtcccttcaagatgtggatcatggaccttaatttccctccctggtagtgtgggacagacctagtgacccacttctaaccaagagaatctaagagagtgacaggatgtgactgaggttaaagcataaacggtacgaggagttcctctgtctctcatcacttgatgtgagggaagctgtgttgtgaacagccccatagatgcccttgggacaaggaacagaagtctcctgccaacagccacatgaatgagcttcaaagaggatcctgcagcctcagcccagcctcagagggctgcagccttggccgacacccggttacagcctcctgagaaaccttgagctgggaccatttagcagagctgctcctggacctgacccgtagaaactgtcagataacaaacatctcttgttgtaaactgctaagttttggggtaatttgttaccctgccatagataaataatacaatctgtaaagaaacacaaatttctatgttaacagtggagaggtacccattaaaggaaatgaaaagtattgtggaatttctgaattaatacgggtaaagaatgatgaaaaacctgagccaaccatcaaagaaaagtaaatgggaaagggaaaataacaataatttagtaagcataaaccagaaaaatgtaataaaatcagtaaacacacaataagatggaagaggttaaacccattatatatcatctatcattataaattatgaattttcctatcaaattggaaaaaaagaaaattcaagtagatgctgtttatatgaggcacatttaaaataaagacacaatgaaaagttgaaaattaattgttgagcaaggagttaatggaaaaatgcagacaaaaaaagaagcatagtggcagtatgaagatgaatcaacatggaatccaaggggcgaggtcctgagcagagaaggagattatgaaacatggaagtgcaattcacagagaaactaaagtcttcagaaacatgtatgtaccaaataatgtggtagccaaacacataaagcaaaactcccaggaatacacagagaacatggtaaaaatataattataatagaaggtattttaatacaaaggactaattatctgagtatctattattcaagtccctgtaattataagactgctttgaaaaacaaaagtattcctggtacaattacagcagcaacaataatgataataagaaataacaaacgttaagctcctatgatgcgccagccaaggttctaagtactttacatgtactaacccttttggtccttaccacaaattatatgtcatgatttattactatctgttagccaagatgactataataatttcttccatccttgtatatacaaacttttgcaatgtgactttatcaattcctcttttaagaggcagaatgtatttttttttttttttgagatggtgtctcactctattgcccaggctggagtgcagtgatgtgatctcagctcactgcaacctctgcctcccaggttggagtgattctcctgccttagcctcccaagtagctgtgactacaggtgcacaccacaccaccatgcccggctaattttttttgtatttttagtagagatgggtttttgccgagttggccaggctggtctccaactcctgatctcaggtgatccatccacctcagcctccctaagtgctgtggcgtgagccactgtacccggcctatttttatttctttttttgagatggggtctcattctgtcacccaggttgaagtgcagtggctcagtctcggctcactgcaacttcctcctcccaggctcaagtggtcctcccacctcagcctctcagtagtggggactacaggtgcgaaccaccaagcctacctaatttttcatatttttgtaagagacagggtttcgccatgttacccaagctggtctcaaactcctgaactcaggcaatccagccccctcagcctcccaaagagaatctatttttatatccatgaatctggtctggctttgcaacttgctttgacaatgggatgttgtggaaattactttttttttacttgtgagttagccctcaagacactgcacagcttccactcttggtctcttggaacacttccaccatcgtgtgaagaagcctgggctgggctgctgaagacctgtagccaaacacccatcatcagacatgtgggtgaggcatcttagaacatctggtcccagctgagttgctggataactatagctgcattagtaaccaaggacaagatcagcagaagagccatccagctgagcccacaccaaactgccacacacagaattgtgagaaaacaaaatggtttttgtttaaaatttttgaactggtttcttttgcagaactagacaactgagaaaccattcccattttgcaaatgaggaaatagaagcacaggaaggttgagtaatttgcccaaattttcacagctatgattatgattcttagttaagtcgtgacttgaatccagttactaatgaattgagcttttataaaattattattcactcaaccattcctcccagttcactgttagcatttatcctggacaaatgcatcagcatttttgatggtcagcctctcaataatcgtagaaataccccatagtacaatataattcaagtcaattacaaagtgaaactacacattttgaaaaaaaaaaaaaaaaggattttatgaaagagcaatattgggtgaggtgctggtggctcatacctgtaatcccaacactttgaaaggccaaggtgggaggattgcttgaggccacgagttcaagaccagcgtgggcaacatagtgagagcttgtctcagtacataaataaaaataaatggtttgattattgtgacagaagttgtcaactgttacccaatattcattctgttttcactgacatgaacccagttttgcctagggtggtaatgtactcagctaaaaatcctctcctcccagactcttctgcagctaggggtagtcgtgtgatggtgtttcggccaacgtaacatgaaaaattctacttgtggggcttctgtgaaagttattgctttcccgataaataaggggcagactaaggtggctcaaacctttttgccttgagtcatgccccctttgaactggaatgtggatgagattcctagaggtgcagctgctaccttgagaaagcaaataggaaaccttcaggagggtgaagcgggggccagaagggccacatctgtgatgtttttcgtgtgcaatggcaccagcccatctgtttgcctttggattttttttgtcatataagaaaaataagctcctagcttgttaaagttgctaaattgggtttctgtcaaatgcaaccctgactgatacaaatagcaaaggattaagagaggcccttaggacgatagctgaagccatcaattaccttttgcaaaacacagtagtattgcagaagtcagatgtgaagtgaagggtgtcttgtcatgatatcacacaattttattagaaaaattatactttcaaaaagtcaacattagatttattatttctaagcaaactttttattcaagtataacatacctatgggaaagtacactggatttatatttgtcttaaaaatgacattgttgcaattataacctaaatttcagtaaatattagataaagtaaatgtcttttttgtactacttggtttcatgtctcggtataacattatgcatgaaattttgccctcccccaagtggattcacgctaaagtgttttttctttttcctctaatacaattatttttggataatgatgatgacttgtatctctttcagaaagtagtagatttctgtagaaaggcctctgtaggaggccgggcgcagtggctcacacctgtaatgccagcactttggtggccaaggcgggaggatctcagggaatcaagaccaaaaaaaaaaaaaaaaaattctacctgttatcttctctgatcatatcctagtgaaaacagaaagcaacaattaaaaaaaaaatccctaacgcggtgaaaccccgtctctactaaaaacacacaaaaaattagccggacatggtggcgggtgcctatagccccagctactcgggaggctgaggcaggaaactggcatgaacccgggaggtggagcttgcagtgagccgagatcgcactattattgcactccagcctgggcgacagagggagactccgtctcgggggaaaaaaaaaaaaatccaacccccacccccaccccccggccctcccactgcccctgcctgctcccctcaagaatcattgaggaaaacaaacccgtaatacttacttggaaattcaaccatttctttttttctttttttttttttttttttttgagacagagtctcgctctgtcacccaggctggagtgcagtggcgcaatctcggctcactgcaacctccacctcctgggttcaagcgattcccctgcctcagtctcccgagtagctgggactacaggcgtccgccaccacgcccagctaattttttgtatttttagtagagacggggtttcactgtgctagccaggatggtctcgttctgacctcgtgatctgcccgtctcggcctcccaaagtgttgggattacaggcatgagccactgcgcccagcctcaactatttcttgacatgtggatcaaaaaaggaattaaggagaagaatttttttttttctgagacagagtcttactctgtggctcagtctggagtgcagtggcaccatctcggctcactgcaacctctgcctcctgggatcaagcaattctcttgtctcagcctccccagtagctgggattacaggcatctgccaccacgcccggctaatttttgtatttttagtagagatggggtttcaccatgttggccaggctggtcttgagctcctgacctcacgtgatccacccacctaggcctcccaaaatgctggaattacagatgtgagccaccatgcttggcctcacagacatttttaattgtaattaaaattatagttactttgcaaaacatgtaacaatttgtcatcccaccagcaatgaccaggataggtgtccacttccccacaacctcatccaccttaaatgctagtgttcttttgaatttttgtcatagtcacaggtactgttctggcaggaatgttcctgacactttgagaggctgaggatctttgcacatgcttgtaggatgtctggagctcctcttctgtgaattgcctcctcctatcttggcccatttttccacggtgttgtttgcctttttgttatcagcttgtagaaggcctttgtttattaaggtcaaggaggcccaggaagtggagccagccttgtgagcagggagggttctttctggggcaaggggcagatcagaagatctgatagagagcccccccccctccaactacgtgctcacagtgtgttcaggacttacagaccacagagcaggaatgtgcagggctcaggtcagcattagggtcaggttcttaggaaaagaaagagcaaaaacaatgaaacacaatacaaagtaaagaacaaacacagtgagaaaatataacataaaataaaataaaggcagtaaggccctgggcctgagaccctgagaaaaagctggtaggtcttagtccacaccctgccccgtgtttccttccttttaaatgtctgcagcaagcattcatattcccgtttaatgaaggatccggccaaacacggtagctcatgcctgtaatcccagcactttgagaggccgaggcaggcgcattgcttgtggccaggagttcgagaccagcctggccaacatggcgaaatcccgtctgtactgcaaatataaaaattaagcttgaacctgggaggcggaggttgcagtgagccgagatggcgccactgcactccagcctgggcaacagagtgagactctgtcttaaaaaaaaaaaaaaaattagccacgcgtgatataaaaattagctgggcatggtggcgcgcgcctgtaatcccagctactactcaggaggctgaggcatgagaatcgcttgaacccgggaggtggaggttgcagggagccgagattacaccactgcactccctcctgggcgacatagtgagaccctgtctcaaaacaaaaacaaaaacaaaacaaacaaacaaaaatccccgtgacccagcccagagaggaatgacagccaggaatggaactcgaggtttcattccacaccacaacactgtcttttaattttttattgttttacttctcttcattgcattttgttttatttcattgtttttaccctttctaaggacttgtgaataaatgcgtggaactgcaatgtgcatacagtaggcgcccaagcgggggcagtgcagcccctgctccccgcccgcgggtgccttcgctgatgagcctgaggcgggcagcccagccctcccgcccgtaggcagcctgactccaggccaaggggcagcggagagcttcggggctgcgcgcaggagcgcacggccaggtgggctttttatggcgcgggccgaggaggtcattctttttagtgggctgtacagcgtccaccgcgaggcactttatttttagcttcttgaaggctacgatggagccgcctcctccgctttcccagtgcttgcctccacctcccccttgacgcccgggtgcccgcggctgctcctggctgcagtgtcccgatctgtgtagtgcagggtccctctagaggtccccgggcaccctcaactctcagcccccgtcccctggcgcagaatattccagctcccgggtcatggccctccacccccactcgaacctccatcctgttctgcgcccgtcctgaattgctctttaaaatagtaataataatttccactttgattttggattcgttgggggggggggggttacacgtgcagatttgttacacgggtgtactgtgaggtttggggtacgaatgatcccgttacctagatagtgagcatggaacccagtaggtggtttttcagcccttgcttcgcccacaccccgtggtagtccccagtgtccgctggtccatctttgtgcccccgtgcaatgcgttgcccttgacgggccaggtgatctccccgaggtgggagcctggccaccctcccccattctgcagccttcacctccaacacccagccagggccagctcagaggcgccctgacttgcccacggggcctgcacccatgctcgcccaaacccctcgcatccagcactgcaggccgggttctgagcgtcgtcgggcgtggtggagctcggcggggcccagcgcgggccttgccgcggggacacagggcagggtcgcgctctgccctctgccgccactccaggtcagcatcctcagggctcgcgtgggtgacggcccgtctcgtagcgggggtgagctgggctggtccgaggggtctccgcggcctccccagccacagtccccgcccgctccgcgccctccccgcggggtcgatggctgggggacccggctccggcccaagccaatcagtccttcctgagcagcgtgaggtggctgcccgagggcgggcggggtgctgctctggcgggctcctggaggcctgggtggcgcagcccgggggagcggagggaggaggcggccctgagaccgagccgcgcggcgggtgggctcccctgaccccgctccgacccggccccgcgccctcccggccgctcgatcgcaaagcgtctgctgccatctggtggcggcgcccgggcatctgcggagcggggaagcctggccaggctggtgctcagacccccacccagcgcccccgcgcccccgcgcccgcgccgctctcccgggaagtccccaacagcctctggctttgctcggcttctcccagcagaaaccgagccccacgtctcctgggagccagcgcgcggtggccggtgccgtgcccagggggtgacgtgcgtccctctctaactcggttttctcatctctaaaatggggttcatggaagtgcgtgccttgtggaggcttcgcaaggctcccaggttcccttagctcagaaatcaggccttacccctgaggcgcgaggctgcgggcacgaggctgcgatttggcggcagccgtatttgcacactgtcacagaattaacctcagagctggctggctgcgggtcctggagggggtgcagaaaaggggagggcgggccaggctcccaccaggagcacctgcagatcgccctgatcgtcaagagcaaggcatgacccctgcagaacgggctgtaggctcggggcgaggggggagggggaggggactgtcaccggggggggggccagaatcctctgagcctggggacaggggactgagcgaggcaggtagagccccaggcccaggcaagagctcgaagagtattagcttttgctgttgtaaaccccatggggtggtctgcaaactgcttcccatactcgctccgtcatgccctggctcggctctgacatcactggtgttggccatatcgcggattttctgtttccccctctgtaaactggggatgccaatgccagcccccactcccggatgaggtacctggtgtacagatggctcggccactctgctgaccgtgcccccgacatcattgttccccggggttttccctctaagctccaagaggttagttaattctctgccagtgtgcagagactcccacagctgcccccaaaccttgaggtctccccccatatcctcctgccttataggcaaggcctgtttcctgagccaagggaaggcgggtgtctttcctgggaaccccctccgcacgatcacagactagagagtccaaaccacagatcatgttttctttccaaaaataggagccccactgaggcagaaacttcattcttttaataagatgatggtatgtttaaggaaaataaatatttcttttaaaaaagaaaaggcgatttggatccactcacatgccaagcactgtcccggagacccaggcttggtgcatggctgcggaggattccagcaggcatgcaactttaattacttctcagtgtaccacagaggtggcctgcagcaccgggtgtgacagcaaggtatgccaccagtaagggggatgtctcagcagctgccagcactctgcctgtgaaaacgccagctccaattcaaaggtatcaaatatttgcctagctgttcaacatttcttcaaataatatactcacgactaattcatatctggactcgacgtcttcatctctccaggcctccctcctggattagcgtgtcttgtctattccgggagaaagttgtcctacattctaaaaatagagctgggagtctggacatgggcatgcacagtcaggggaggctttatttatttatcttaagggttgtcctctgaagacagctgcagctgagcctgggactcactcatcaaatagccattcgcggctgggcgcagtggctcatgcctaaaatcccaacactttgggagaccgaggtgggtggattacctgaggtcaggagttccagaccagcctgggcaacatggtgaaaccccatctctactaaaaatacaataattagccgggcgtggtggtgggcgcctgtaatcccagatactcaggagactgaggcaggggaattgcttgaacccagggggcagaggttgcagtgagccgagattgcaccactaaactccagcctgggtgaaacagtgagactatctcaaaaacaacaacaacaaaacaaaaacaaacaaataaaaaaacaacaacagaaaacaaacagccattcataggtactcagcagagggcagggccttctaagaagtctgtgctggctgctgccttccaaaagaggccgtgctccactccaggggatgctccgtgacctctgaagtgaggacaccctctcaaatcagaggcacgggcctctctcctccatagaggggttcttccgttcctggggattaaaagccccaaatgcccctgtatcatccaggacccattgggtggattgctcaatctggccatccaggcggagttttataaataactgtttgcatgggggacctcaggaggaggagtggtaccctgggtctagtagcagtgggctgttcccatccctggggccgcagggctacgtgaggaggcgttctctgacgcagggcaaggtggctgtgtaggcagcactccctgatagcagtggtgaccgaagaaggaggaggagctcagggaacccccactctaggtgctctcctctgccccccagtttcctgctagggcctcccaggtccacctgcccagaaggcagagcgaggcatccacagatagagtctgtggaggggtacacagagccagtggaggagggtgaagggggtgtgcagggcagaggggagactaccagctcctctctcttttttgaacccgctccacctctccagcctccttctgtgtctcctgtgctaagtaccatttctctttctttctcatgtttcatcacctccgtctctcattgactctcctctctgttttcctcttgatatatcctccccacttctctgctgcagaagaggcgaggtgagtaccattcacctctcccaagtggtccagtggcagtggggcccccacgcactctacaccgttgttgtgttgctagaggaaggagagcagctgagccctggggacctggggacgggcttcatttgattctctgctcttcctcctctgaactactctaagtgaagccaatcaggattactttcatttcatcacttcaaggacttcctcctcggagtcttttcatccttctcctgccttggcctagaattagggagggggagttagtcccctcctctcttcagcccctctggccagcatcaagcccttattgagagctccaactgtgcacccagcgtcagaaatgatttggggtgcctgtgtccggagcatacagtcctgacatgggtggggacccatgatccattcattcagtcatcggacagaatgcatccagggccaccctgcttgggctccgggctagactttttttttttttttttttttgagatggagtcttgctctgtcacccaggctggagtacagtggtgtgatttcactgcaacctctacctcccagattcaagcaaccgatcctactacctcaggctctggagtagtagggactacaggcatgggccacgagcaccatccctggctaatttttttttttttttttttttagtagagatgtggtttcaccacattggccagggtagtctcaaactcctgacctcaagtgatgcagccaccttggtctcccaaagtgctgggattacaggtgtgagccactgggcccagctttttttttttttttttgagacagccttgctctgtcacccaggttggagtacagtggcactatcatggctcactgcagcctctaacttctggactcaaaagatcctcctacctcagcctcctaaatagctaggattataggcatgcaccaccacacccactaattgttttttttttccttttaatttttgttgttgttttgttttttgtttttaggcagagtcttgctctgccacccaggctgaagtgcagtggcatgatctcaggtcactgcaacctctgcctcccgggttcaagtgattcttgtgcctcagcctctcaagtagctgggattagatttcgcaccaccatgcctggctcatttttgtacttttagtggagatggggttttcccatgctggccatgctagtctcaaacttctggcttcaaacgatccgttggcctcagcctcccaaagtgctgggattacaggtgtgagccaccgtgcccagccaatctctggccctgatagagcagatagggaaggtgtgtagcacagtggatcagtagataagcccatccaagcctcagtctcctcttctcttaaatggggatgagaatccctactcacaggtttgtgtgaaggtaatatgacctcacagagggttgctttcttattaagtggcagggacttctgctctgcccctgaagcccccaaatacacataaaaggtgtaacctcagatgcaagtaaggaggcaccaccaagagggtagaggatacagacctgaaacacaaggaggagattggcacctcagctggaacagatgggcttgagcccccgaattctgctcgggttttaaattgaataaaataatccccagaatgaatatcccctctgtgaagcacgtccactgtgaggaaacccctagtaacagatctcaccatggcacaaagaaaatcctgctctcatagtcttggatgatatatacagccagctaatgcaaaaaaaatttcatgttatttttgcttatttttaagtccactgggtgcatcgtggctgatcgctgttctgacatttttcttccctcattaagaaagatgcccctggtgagatacctgtgctgggctcagagcagaaaataaatatcgctggcatccactttcctatactctctgggtgtaattaagaaaaaggcacctgcaggagagagaaagtgcagggtagaaaatggcccagtggttactgctcatgagaactccccagtcttcataaccatccaaatgtcactccttccatgacattcttcttcttcttcttctttttttttttcctgagagagggtctcgctgtgtcgcccaggctgcagtgcagtggtgtgatcatagtgagctatgatcagcctcgagtgagcccgagggagcagcctcgacctcctgggctctaatgatcctcccgcctcagcctcccgagtagcagggaccacaggcgtatgccaccacgccagtctacatatatatatttattttttgtagagataccgtctcactgttgcccaggctggtctggaactcctgggctcaagcaatccttccgcctcagcttcccagagtcctggaattacaggctggagctgctatgccggacccattacaacctcctggatctgccggggtccccctccatctctgagccctaacacttccctttggggacttttcctttccattgcggttttgcttttcccccttcacacgtctcttatcccagctgtagttggctgtcttgtttgttttgtccaagtcaccctgcttttctttggaggacccatccatgactcacagtccatgtgatttaggtagagctccagcagggagtggcactacccaggaatggccaaccaatgagggcacagaagtgcagctgcaggccactgtgattggttcaggggtgggcagtgagctaagctgaaccaatcagaacgaatcccaagatatggcggggaagtgctgaacaagcccctctccttgagctgaggctgggactgaagttgtagtcgcctttggcgccactggggagagcctgcctgtgaaagaattccactccgaggacagctgagcctctcatgacaatctgggtcctgatgccgctgtttgagcccctgggtgcagggctgctggaaacttccggaaggagattgctcttctctctgggagacgtccccggggaagcttcagaccctgccatctcgtccatccccaccatgcccaccaccgctctggctgaggcagctccctgcggagtcctgctccgggctcagtctcccagagaggcagagtcgggcaccgtgggcatgggagacctgcagcctgcctggttctcagctctcaggggctggccagggtcacagttactgtagcccagggggattctgtgagagacagatgggctaatttggctcgttcgtcatttttaatgccctaatttcctgttttacacgcagaaatggcccataaatggcacagcaggcttcagggagctgaacttgtacttcccgctgggactgacttactcctactttttggaatcaggtgcacctgcagccgttcaggagctggctggccgactgtcccagtacctccttggtcaccttcatacggagctttggtccttcaactttggaaagggttttgattaccgaatgccaggctctctttcagtcggattttcctttgccccactttatttcattttgcttttttttttttaaattattttctgggctaggagccggggctcatgcctgtaatgctagcactttgggacaccaaagcgggtggatcatgaggttcggagttcaagactagcccggccagcacggtgaaacctcatctctactaaaaatacaaaaatattagctgggtttggtggtacacccctgtagtcccagctactcaggaggctgaggcatgagaatcacttgaacctggggggtggaggttacagcgagccgagatcacgacactgcactgggtgacagatgagactctgtctcaaaaaaaaaattattttccgtagagatgggggtctttctatgttgtccaggctggtcttgaaatgctgggctcaagcaatcctcccaccttggcttcccaaagcactgagatgacaggcatgagctactgtgcccagcccatttgccccactttgcacactttctcctctcttgtcacctttccttccattaccttcaaatgtgctcatcaaaccgtgagcccctatgaggcactgggcgtgcacaccctgagcagaggcctccctgatgctccacgcccatgtagctttagtttctgctgttcctctctcctagggtgtcttgttccttccctgcataacccttatcatggtctgccattgctgagcattttgttatggttgtttattgggttcactgctgttacactgtcagttctcagaagacagaaactgatttctttttctccttaagaacgtttgcatccagctcagagactggcccacggagggccctagagaaacacccagggcgtgaccgagtgggtgggtgtgagtgtgccgcaccctggccctggtgctggaggggaaccaagcagaacctgccccaacactgctcccaggaggctcagcttctagaggggtagcggtgggagaggggttggtggggtgtggtgagctgtcctaagtgcaagtgcagatcagagtctgagctgcagctgggagagggagacaggaagcctgcccagcagcggggagcctggggtggactctttttttttttttttttttttgtcagagacagggtctcacactgtcaccgagggtggagtgctgtggtgtaatctcagctcactgcagcctcgacctcccgaactcaagagatccttccatctcagcctcccaagtacctgggaatacaagtgcatgccaccacactcggctaattttttgttgttgttattttttgtagagacagggtctcactatattgcacaggctcgtcttgaactcctgggctcatcaaggaatcctcctgccttgactgcccataacgctgagattacaggcatgagccaccttgccccgccttgggtggactcttgactgaaacacagaactttaagagaaatgcagaaataagagaatgggggctgccatccaatgcttgatcatattcgtctcctgctttgctttctgatcctgacttcccatggaggaattcagccttaggagcagaaatgggctgtggtttctaatctgccccacatcattcagcacagggctgggctgcgtggcctgtgactaatcagcgctcacccataagaaatggtgtgcatctgcaaatgtcgtggtgtcccttgcaatgccctatttcaggtctgcagtgggtgagggatgggcagggaagcacagtgaattatgtgacaccagcctggaatggcttcatccaacaaagggctgacattttctcttggtttattttgagatggagtctcaaaaatctgattacagatcacgcctgtaatctcaacactttgggaagtcaaggcaggaggattccttgatgagcccaggagttcgagaccagcctctgcaacatagtgagaccctgtctccacagttgcccaggctggagggcagtggcgcgatctcggctcactgaaacctccgcctcttgggttcaagcgattctcctgcctcagcctcccgagtagctgggattacaggcatgcaccaccatgcctggctaatttttgtatttttagtagagacagggtttcaccatatctggtctcgaacttctgacctcaagtgatccccccagctgggcctctcaaaatgctgggattacagacatgagccaccggcccggccaggagtgacatgttcattccaagagcccatctctgttcctgtattatttacaacggacgctggcctttcggacccccaaacatgtaagtggttctagctcgaggagaggtgtgaggcatgtgctatgggttcaagtcccagctctaccactgagtagtgaaaggcctggggaagctccttaacctctcacaggcttacttcctgcccctgagaagtgggagcagtgggtagccccaggcgagggtgggggttggggcaatgcctggcccataatgaagcaccctctgccgagcctctgcgtggctgccccgaagcctgggtgcaaggcccctctgtcacctctggagtacttgcctccatcaaagaagggagcagctgcctcctgccggtgttagccaggcataggctctctgccctccctgcctgggctttgtgtattcttggtgttcaaaaggtatctcttgaatgatgtgtgaacaactggtagaaactcatcagcacttatggaaatagcacaccaagttgtcaactgcccgtaaaccctttgccatccctccggtggcagcatgttccccgctggtggggagaaagggccttgcttggtctcatggaccagccaggcaggcaaggaggccgcaaacacaggactaatagcaccctcgtggcctgcccccagccctcatttcagaacgtggcccttcctgaagccgctttagctggctgggggaggggtggggttggaggggtggagacggtagcggttctccaccttccctctgccccgctgtgccgcccagcagatggggagttagcacgtcacaggtgcagctccactttggtcacctggaggctctgcttgcaaatgtggggctggtgcttggaattcaagatgcccaataaaggatccatccacagcggctgcccacgggagccatctctctgtggctcccaggagccaggagggcctggagctggggacagggggaagttctgattttaaattggggaattctgacatcagcccagtctcgttccccagaaagaaactggtcccgtctgccgtctttccagatagttccttctggagcagaagtagtccaaattccaaacctctgattactgacatttgcggttagttttttggtattatttttatacaggaaaacttgttctgaataatgcaactttacacagacactctcaccactgggcctcaccaagtcctgattttcaaaacactcagagcccttcctgagctcacctgagagatgctgtctttggagtttgttcctgatgagttttagagagcttttctttttctttgtttctttgtttctttctctgtttctttctttttttatttttggttttgttttttgagatagggtctttctctgtcacccaggctgcagtgcagtggtatgatctccgttcactgcaacctcggtctcctggcttctagtgattctcctgcctgaacctcccaagtaacaggaattacaggtgtgcactaccatgcccagcaaattttttttttttttttttttgagacagagtcttgctctgtcacccaggctggagtacagtggcacgatcttggctcactgcaagctccgcctcccaggttcacgccattctcctgcctcagcctcctgagtagctgggactacgggcgcccgccaccgtgctcggctaattttttgtatttctttaatagaggcagggtttcaccgtgttagccacgacggtctcgatctcctgacctcgtgatccacccgccttggcctcccaaagtgctgggattacaggcgtgagccaccgcacccagcctccagctaatttttatatctactaaaagtagagatgggttttcaccatgttggccaggttggtctcgaactcctgacctcaagtgatccacctgccttggcctcccaaagtgctgggattacaggtgtaagccactgcacccttcttttctttcttttctttctttccttctctccctccctccccttcctccttctctccctctcacctttccttccttcttccttcttcctttcctttcctttcctctccttctccttccccttccccttcccattctcattcccttccttctctctctttctttcttttcttctttcctaaagcaggggttacacaaattaaggtgaaccgaatacatctatatttagcaagtgaatgctttaacttcaacacacatagatacttcctagaaaccctccccaacacagcgacaacaggctgcattgggggctcatcaggaatgagtggcctgggcagaatggccctccaacccctcgcactgccctgcccataaccggccctgcccttgagggcttttgggaaaaggtaggaggggcagaaataaccttgactttcagccaaggcagaagagccagaggatggctgctgctcctggcctgcgcactgcggctcctggaagccaagacgggcaggcttgtgtggccgcggtgagcaaggagggcagccatcccatgcagatgtgtgggaggggcggggaggcagccaggagtagctgtgtcaggcaggccaggccaaggtcctggactggcctccttgaaaagcagcccctcatccctgatagcccagggttgcggggagccattgggggatggtctgagatgatgtctccggaccccgtgcaggagttttgttacgacaaatctagtcccttctcagctcctatggtgacaagaagctccagctattttattttgttttgtttactttagagatgggattttgctgtgttgcccaggctggagtgcagtggccccatctcagctcactgcagcctcaaattcctgggctcaagcgatcctcccacctcagcctcctgagtacctgggactacaggcatgtgccacaacgccttgctaatattttgatttttaaaaaatttatttttatgtatttattttttgtgtggagatctggaattcttgggctcacacgatcctccttcctcggcctcccaaagcactgggatttcaggcatgagccccacagtccagccagctccagcttttatttactttttatttttttgagacaaagagtctcgctctgtcacccaggctggagtgcagtggtgtgatctcagctcacgcaacctccacctcctgggttcaagcgcttctcatgcctcagcctccagaatatctgggactacaggtgtgtaccactacacctggctaatttttgtattttttgtagagacagggtttcgccaggttggctgggctggtctcaaactcctggccccaagtgatcccccactttggcctcccaaagtgttgggattacaggcgtgagccaccgcacctggcccagctctaacttttaaacctgctcactggctggctctcttctcgacttcttgggacctgagttgtccttcatctctgtgacctacctgacaggtgtttctggggtccagcctgaagcacctggctggtgagatcagagtccaattctcaccctcttcccaggaccccctcccagctcctgagcctgtcaaccctggctatgcacagccctcgcctgagaagcgtcttcaaaattctagtgccttctcctcccttcaattccaggataatggcacacacagcaccagtcaggccctggcctgtgttgcaggcacacctccgatacattttgacctgcatgccaactgcagaacctaaacccaggcaggggtcactccccagcagggtgctgaggttcaaagagctcgaaggaaatacctgcctgggaagacaggtgacaggtgactgagttcctctccagaactttccagacaataatcaggctgtgtgtcaaattcaccaagatttagctccagacccagctgatctgcagccaggatgctattgggagcatcactgcttccgtctttgacccatctttccacgtggccccccagacagagagcacttccaacctatgcataaaaatacaggggaaaggccaggtgcagtggctcatgcctgtaatcccagtactttgggagaccgaggccattggatcacttgaggtcaggagttcgagaccagcctggccaacgtggcgaaaccccgcctctactaaaaatataaaagttagctgggcatggtggtgggcacctgtaatcccaactactcaggaagccaaggcaggagaatcacttgaacccaggaggtggaggctgcagtgagccaagatcatgccagttatacaacagcctgggtctgtctcaaaaaaaaaaaaaaaaaaaaaaagggagcagagcgggggaagaaaaaaaaaaaaacccagagagcactgttatttaccctgatgcctcattttcaagcatgcattgtgaatagagctgaccacagtagcacaggtctcaccgtaggcctccaggaacaccctgcaacctcagtctgcccctccacattcatttccaggaaactggagttgatcgttaattctcagacatcctttggtgcagactggaggatatcaatgaacatgaacacatgcgagagttcctgtacggagctgtggaccataaaccacgcatgctgtcccggtggcaagtcagggggctttctgggtagttctgctttctctccctgtatggagagttccacagtgactctggggcaggcagggttgagggccccttatcagtcacctggtccctcctctccttcccaatgtcacccccattctgctgacctcaatccctgctctccagctacagatacatttccttgatcttcaccttgaagcctgggcccttgctcttctctattcctggcacatcctcctcacagatctttacatagcaggttgattctcaccctttaagtcttgctcaaggtcacctcctctgagaaaccctccctgaccacccaggctaaaggaatccccgccacccctcccctcccacccgccccccgccgcacaaaatgcttcccacacctgccacatctgggtcagtctcctgtctgtagagtgcaagttcacagctctagttacagcagctacaactgtgtctggagctggggtactaccccatttaaccatctgttgattaatgcacttgattaacatcagaggacgtaaggtcctcgtaaagctaagaaagaatttaggagaatgactagggctggccacattagcaatggacccacagtaggaggcttcagggacaccctgcctgtgtccctccagtgttcactgctcccttgcatgagacccagaaaggggctggcactctgcttggggaaaggctctgcctccaggagactgctctgttgtgtgcagaacaagggggaagtgccagaaattaatggcccagggaacagccttcagcaatgatgaagagaagttggataagtagcccagctctcatgtctacgggatgggtcaaggctgagtctgcactgcctcccagaggccccagtagaggggctgcctgcagcagtatctgctcagtcatacacccctacacgtgtacactaggaaggaagtgctggcttccttcccttccctgctgcacacaacactccctgaaacatgcctgcaagaaccaccccttggctcagcagctttgcagtgatgaatccaacctctgcagaaaaggcaccctggtgttctaattcctgggcatggacaaactgccccgaggaggatgagaggtgtctccttcacctctgatgttgggtctcaggttcctgggtaaagggactcctttggtttcctggctcctgccccacagacaaattaaactggacaaggtgacaaaaggagtcatttggaaaagtcttgggacagggcttagtggctcatgactgtaatcccagcactttgggaagttgaagccaggagtttgagaacaccctgggcaacacagtgagactccatctccacaaaattttttcagacttagcagagtgaggtgacatgtgtctgtagcttcttgagaggccaagtcaggaggatcacttgagcctgagttcaaggctgcagtaagctatgatcgcaccactgcactttagcctgggcaacagagcaagaccctgtctctaaaaaaaaaaaaaagaaaaagaaaaagaaaagtcaggccgggtgcggtggctcacacctgtaatcccagtactttgggaggccaaggcaggtggatcacctgaggtcaggagtttgagatcagcctggccaacatggcaagaccccatctctactaaaaaatacaaaaattagctggtcttggtggtaggcacctgtaatcccagctactcaagaggctgaggcaggagaattgcttgaactctggaggcggaggttgcagtgagccaagatcacaccattgcactccagcctgggcgacaagagttaaactctgtttcaccaaaaaaaaaaaaaagaaggaaagtcaaagtcttgtggctaaagacggcaggtggaatgaggagtgggagagaagggcggggaaaggaggtgagatgcctggagaagttgaggtccagggaaccaactccacccagagcaagctctctgcaggcaggactcaagcaacagccgcagatgggagcaaaaaaagttttgctactcctccctcccagagatatttctaagagctccattttctttccagttggctaagaagcaaaaaaggaacaatagattcaagctgaaataatttgcatttatgatgaacacaaggaatatctaccttgcattttcctaaaaaagaaaaattaaaccccatttttaattaactgataaactattaatcaaatttttgcaatgttaggtgacacattattcatttagatagaatgactgtgaacttaaactaatcaaatctgatttgcccacataggcttgattgaaatacattttaactagcatatacaaagagaaaatcttggatttcttacctaatcttcagagtatactgctgagttaataagggcagttttttttttaaatgagaccaccatttcttcatctgcatatcaaaatcaagaggaacttaattgcaaaacacatattcctgaaatctaatcattacactgctttagggtattttattgaagcatgttaaattatggacagaatattaatgatgaaactaatcaaacccaattagtcacttctaacaatagtcacataaatatacaagtcaggtactaaagtactgtagatatgatgtaaaaatggttaaaatcttaaatgtatggaatatttatgaaatattcatgttgaatttaaagccaaaaattattggggtaagtcactttaaagaaaataaattaggcagtgtcctatactgtttgaccggaattcacaagttcacattttcttcaggtatctttgaatctaggagattagtgagtctataatcaatcaatcagcaaaattttaataagatgacttaccatattcatgacctagtatttcattcttgcatccagagacttttttttggatttttgttttctgactttttcaaggccttttggaaaggggtctccaggccttggaaaagcagatggagtggtggatgatttctggggttggggatttgccatccacactgtctccttccctgcctccagccccaggtgcagaacttgctctaggggcaaaagcagtgaggacagaacagaggagtcactgcccagggggcctcctcctcctcctctcatacctgaggctgcagaggaagctgaagggcccaggggagctcctggccttggcctgtgaggattcttggtggaagattccaggctggggagccaggccaaagcagacaggcagtactgggtctggggttccccaggcagagacctccctctgcttcagttcaagccagtcccttctggctacctgggcccagactccagcatccacacatatacagccagcagtttcatcacgtggtagctacagctgccttcttaatcaaggaggttgtcaagcctcaccatttgcttttctggcccttaccctgttctgctgtccactcctgatcccccatttcctccctccagacttctttccaggatgctgcattcctaccacgtgtgctgggaatctcagctcctggagaaagccggtcagcggctctgggccctgctctggccagacatctcaagtggagcaccacaggaaataggaaacattgttcattcattcatccatccacccatctatcccatccacccacccatccacccatccatgcatccattcacccatccatccatccatgtacccattcatgcacacatctatccatccatctacccatgaatctatcccatccatccacccacacatccatctacccattcatccacccatctatccatccatctactcatgaatctatcccatccacccacccatgcatccatctacgcatccttctgcccatctatccatccatctactcatgaatctatcccatccatccacccatgcatctgtgtacccattcaggcatccatctatccatccacctacccatgcatctatcccatccacccacccatccatgcatctagtcatccatccttccatccgtccatccatccatccatccatcaatccacatacccattaatccacccgtctatccatctacccatgcatttatcccatccatccacccatgcatccatctacccttccatccacccatctatccatccatctatcccacccacccacccatccatccatgcatccatgcatccatgcatccatgcatccttccatccatccatccacatacccattcatccacccatctatccatccatctaccaatgcatctatcccatccatccacccatgcatccatctaccaatccatccacccatctattcatccatctatcccacccacccatccatgcatctattcacccatccatccatccatgtacccattcatccacccatctatccatccatctaccaatgcatctatcccatccatccacccatgcatccatctaccaatccatccacccatctattcatccatctatcccacccacccatccatgcatctattcacccatccatccatccatgtactcattcatccacccatctatccatccatctacctacgaatctatccatctatccacccattcatccacccatctatccatgggtaggtagatactcatgcatctatcccacccacccacccacccacccatccatgcatgcatgcatccatccatccatgcatcaacccacccttccatctatccatccatccatccatccatccatccatccatccatccatgcatcccataaacatttaccaaagacaaatatgtcccgggcccagtgctggactctccccaagcctggggagcatattaaagaagtagactttgtgttgctttttcccgcatggcatgcatgctcctgcttcagagaaagacatctgtattgtcccttgaaggacccctctgccccacttttattccctaaggtctagggggctgctccatcccctcaatccactggccatgtgatccaggcctgccctagtccctgagatgggctcacaggtgggtacatgaccagggtgtcatcctggcacttttgctggaactaaaagaggagataagccctttgctgcttggggtctcttgggggagaggttgggaccatgacatggagatggcctgcctgagactgaagccgacagaggagaggaggccaagtccttatgacatcgactgggctcccggagcccactctgcctggaagtttccacttacctgagccaataatattttttcctttagccaggttgaattgtattttctgtcacttacaaccaaaggagtcttggctcatagagaagataaacaggaaagacactatccaatgccacttcctccatgaagtcttccctgattcttgccagctccattggatattttcctgcttagaagcctggcgggggaggagggattgttcttatggatctctcatgaccttagctttttatgccttggagtataaaggggaaatctgggtgcaaagcctgtatatgcatttgagtggggacaaagcagcagaaagaaagatacagagttaagcacaagatcttagcggaagatgaaaacctcagccaaatataagtgggggactctgcagtgaggcaagtggacacctcagaggacatgggagtgagagtggtgttgaaatcacccagttctaagctacagggagagggtagtgctcttggccttggtgcatatctgtgacccaggtcccctatccaaccatgagcctccaacgcaggcaagaagccggcctcttccttccagcctcctggcaccatcaggaagggttgcttggcaggccacctccggactttgatgcagaatgtccccaggttctataagcctccaccctcgagttcccaaaggctctacttgagatgttgccttgggtcaatgtgtggcctaggttcctggtccattggtgcatttccatagcaggttaagctggaccttggtaaagtgtcacatgtacttttttttttttttgagacagtctcgctctgtgtcccaggctgaagtacggtggtgtgatctcagctcactgcagcctccacctcccaggttcaagcgattctcctgcctcagcctcccgagtacctgggtttacaggcacccaccaccatactagctaatttttgtatttttaatagagatggggtttcaccacgttggccagattggtcttgagctcctgacctcaggtgatccaccagcctcagcctgccaaaatcctgggattaaaggcatgagcctccacggccagccttgaggccattttaaattcatcctatcatcacatgattctgatcttcttccctcccaagactgggtttcttgtaggaggcatggctgctgtgggtttcaggtaagcaacttagcctcagtgtctttatctgtgaaatggacatcatgatggctaacccatggcatttagacaatgcaagccagcttttttttagccttgtagggtccagacccgatgggtgaaccatagtctgtctctttgcaagcagtcaggcctggacctgtgctctcatttttgtcaagaagaagagagtctgtactgatgaaaccagaatctatttcaagtcaagcagaacttctccggaagctggggtagcatcccatgtccccacaatttgctgcagggggagctggggcaccccaaggaaggtccacttttccctgccaggaagctgaggaggcagtgggggcataggtgcttccttcatctctccattttgtgtggctgcagaatttgtgcacagccctggtggcatcatagttactcctgccacccacctggcaggcctccattgcttctaaatgcggtccaggcctctttctgccctctccctcccagggcctggacagacccatggaggggaggcgggtcccagggtcagggcaggctgataccttggaaagaaagcattgtgtcatcagagacacacatgggaggatgatttatttctgctctggactgccacagcggtctggccttatctctgttttgcaaggccccccggcccacgtgctcaaccactctgcttcactctagaaagaagagaaccatttagatgactgactgaattttcctggaaatctggccctccatagatcttcctggaaacatctggagcttatttgtaagctgttgaggcaccatcaaatcccacatcacaaagagatgcacccgttttaaatgaacttagagaagatttggcgaatccatactccagtctacttaggctttaaaccgtcttttattttttctcactctgtcacccaggctgaagtgcagtggcactatctaggctcactgcaagctccgcctcctgggttcaagccatcctagtgcctcagcctcccagagtagctgtgactacaggtgtgcaccatcacgcccggctgatttttgtatttttagtagaggtggggtttcaccatgttggccagcctggtctcaaactcctgacctcaagtgatctgcccgcctcagcctcccaaagtgctgggattgcaggcgcgagccaccgtactcagccagaaataggttttaaaccttccaaactacttaattttggaggattttgattctattgattgaaaacataaaaatgcaactcttctcattcaaggagcacaaaccccgactgtcatcagggaagattggcatctgctggccggatcgtcacagaattcttggtccatttgtatggctggtgggaggcgtggtcactgggaggggagcaccatgacccagcggtgcccgggctctgtgggagacacatgtctccctgaagtgcctgtttagttatcaagccattaaaccaagtatcaaaataaaatgaactcagaaccaggctttcaaattgctgcatcacgaagtgttaatcaagattttcaaaaataatgaagcacatttaatcacattgccattcactaagagtatcataattaatatttgggtgagagtaaaaagattgtgttgttaataaataagttattttaaatattgtttatctttagcttatccttaaaacatctagtcagtgtatgttttattataaacatagtaaaatagtaccatagtacatgcgtattggtggcacgtctttgggatctcctaaaagcacacctgagttaaggaatgggtgcaggtagtttatttgggagttgatttcaggaagcatgagggagggagtaggggatgagggagggagtagggaatgagggagggagtagggaatgagggagggagtagggaatgagacagggggccaggcacggtggctcatgcctgtaatcccagaactttgggaggctgaggcgggcagatcgcttgaggccaggagttcgagactagcctggccaatatgacaaaaccccatctgtactaaaaatacaaaaattagccgggtgtggtggtatgcacctgtaatcccagctactctggaggctgaagcagaagaatcactggaacccaggaggcagaggttgtcgtgaactgagatcatgcaactgcactccagcccctgagtgagagagtgagactctgtctcaaaaaaaaagacagggagggtgcattcaggacaggctcaccccgctccacggggccttctgagagatcaggtagaatgcattcaaattgtcccattgaggaatgaggaagctgggatatcttccccctatttctgtcctttcttggtggagagttgcccttaggataactccccagtactttcaggctgccctccatgctgactagcaagcaaaaatcatttagcttaaaaatcagaggggacacggtgaaaccccgtctctactaaaaaaaaaatacaaaaaattagccgggcgtagtggcgggcgcctgtagtcccagctactcgggaggctgaggcaggagaatggcgtgaacccgggaggcggagcttgcagtgagccgagatcgcgccactgcactccagcctgggcgacagagcgagactccgtctcaaaaaaaaaaaaaaaaaaaaaatcagaggggaggccaggcacggtggctcacacctgtaatcccagcacttcgggaggccaagtcaggcagatcactgggggtcaggagttcgagaccagcctggccaacacagcaaaaccctgtctctactgaaaaaaaaaaaaagccaggagtggtggtccacacctgtagtctcagctacttgggagactgaggtgagagaatcacttgaacacagtaggcagaggtggcagtgagccaagatcatgccactgcactccagcctgcatgacagagtgagactgtgcccctcaccccgcacccccccaccacctaccgaaaaaaaaagcagagaggagaaaaagctagtggtgggaggcttgcatgggcagtgtctaccacagctacgggtgaacccagaggtgggctgaggagctgcagggtgggccagtgacaggatctgctgaaagatctgtgcttgtggccaggtgtggtggctcacgcctataatcccagcactttgggaggctgaggcgggtggatcacgtgaggtcaggagttcaagaccagcctgccaacatggtgaaaccctgtctctacaaaaatacaaaagttagctgggcatgatggggggatgcctgtattcccagctactcgggaggatgaggcaggagaattgcttgaacctgggaggtgaatgttgcagtggcgcatgtcgccattgcactccagcctgagcgacagagagagactccatctcaaaaaaaaaaaaaaaaaaaaaaaaaaaaaaaaaagagagagatctgtgcttgtaaacatttggctgaaaagggtgaataaccaaacactaggtaaggctggcacagtggctcacacctgtaatcccagcactttgggaagctgaggtgggaagagtgttttagaacaggagttcaagatcagcctgggcaatgtagtaagactgtttctatgacaattttgttttaaataaaataaaaattagcagggcatgtggtgcacacctgtattcccaggtatttgggaagctcagcggtaggattccttgagcccaggagttcaaggcagcagtgagctatgattgtgccgccgcactccagcctgggtgacagagcaaaatcttatctccaaaacaaaacgacaaaacaaaactgaatggagactactcatcttgagatttttatgaagtggcaatgaactggtgatggggagtaagtgctatttgaatccaatctccacccttgttattaacaacgaaagctcaccagcgtgcccccaccccccaccatccaccccttgtcccttggcacccagcccaggttatttcactggtaaaatctgtcaaatcctaaaggacaagaaaataattgtgccgctttgactgtcccagagcataggaaaagacctgctatgtccctaaatgaagacttactgttggaatgatgtgcattccccttggattagtctacaaatttagtgtaattccaatcaaagcaaagggaaactcattctgtcaaaatttttatgcctttcttttaagagctcctgaaaggcacccctcgatgcctttgaattttatttttttaatcaagttaattgaggtataatttccatacaaaaaaaagtgcatccatttgtagtgtgcactttgatgagtttggcagacgtgtgcacccaccaaaagcaacactacgactgagacacagaacatttccaacacccccaaaagtttctttatgctttcttcagtcccctccccaacacctggccacagggaccactgacctccttcctgttactagagattagtttgcattttctagattttatgtaagtggaatgatgccatgtgcatttttttgtgtctggcatttttcactctgcatggttatcttggtgtttagccacgtggtctgttcacacatattaccaagtactttcctgttgtacagatataccatattttgtttgtcaattcacctgttgttttgtcatttatgttgtttccagtctttctctggctcttgtgaataaacaataaacattttaatttttatttttattttttttttttattttttttttttaaaggacatatcatatttattcatacacatgctggaattattggtgcagacatttaaatacattttctttgagaaagtccttttttttttttttttttgatggagtttccctcttgttgcccaggctggagtgcaatggtgcaatctcagctcacaacaacctctgcctcctgggttcaagcaattctcctgcctcagcctcccaagtagctgggattacaggcatgcaccaccacgcccagctaattttttttatttttagtagagacggggtttctccgtgttggtcaggctggtcttgaactcctgatctcaggtgatctgcccaccttggcctgccacagtgctgggattacagtcgtgagccaccacagctggcctgggaaagtccattcttttttttctttttttttttttttttaaatttatttttttattgataattcttgggtgtttctcacagagggggatttggcagggtcatgggacaatagtggagggaaggtcagcagataaacaagtgaacaaaggtctctggttttcctaggcagaggaccccgcggccttccgcagtgtttgtgtccctgattacttgagattagggattggtgatgactcttaacgagcatgctgccttcaagcatctgtttaacaaagcacatcttgcactgcccttaatccatttaaccctgagtggacacagcacatgtttcagagagcacagggttgggggtaaggtcacagatcaacaggatcccaaggcagaggaatttttcttagtgcagaacaaaatgaaaagtctcccatgtctacttctttctacacagacacggcaaccatccgatttctcaatcttttccccacctttcccgcctttctattccacaatgccgccattgtcatcctggcccgttctcaatgagctgttgggcacacctcccagacggggtggtggccgggcagaggggctcctcacttcccagtaggggcggccgggcagaggcgcccctcacctcccggacggggcggctggccgggcaggggggctgacccccccccacctccctcccggacggggcggctggccgggcggggggctgaccccccaacctccctcccggacggggcggctggccgggcggggggctgacccccccacctccctcccggacggggcggctggccgggcagaggggctcctcacttcccagtaggggcggccaggcagaggcgcccctcacctcccggacggggcggctggccgggcaggggggccgaccccccccacctccctcccggacggggcggctggccgggcggggggccgacccccccacctccctcccggacggggcggctggccgggcagaggggctcctcacttcccagtaggggcggccgggcagaggcgcccctcacctcccagacggggcggctggccgggcggagggctgagccccccatctccctcccggacggggtggctggccgggctgaggggctcctcacttcccagtaggggcggccgggcagaggcgcccctcacctcccggacggggcggctggccgggcggggggctgacccccccacctccctcccggatggcacggctggccgggcgggggggctgaccccccacctccctcccggacagggcggctggctgggcgggggggctgaccccccccacctccctcccggacggggcggctggccgggcggggggctgacccccccacctccctcccggacggggcggctggccgggcagaggggctcctcacttcccagtaggggcggccgggcagaggcgcccctcacctcccggacggggcggctggccgggcaggggggccgacccccccccacctccctcccggacggggcggctggccgggcggggggccgacccccccacctccctcccggacggggcggctggccgggcagaggggctcctcacttcccagtaggggcggccgggcagaggcgcccctcacctcccagacggggcggctggccgggcggagggctgacccccccacctccctcccggacagggcggctggccgggcggggggctgacccccctacctccctcccggacggggcggctggccgggtggggggactgacccccccatctccctcccggacggggtggctggccgggctgaggggctcctcacttcccagtaggggcggccgggcagaggcgcccctcaccgcccggacggggcggctggccgggcggggggccgaccccctcacctccctcccggacggggcgactggccgggcagaggggctcctcacttcccagtaggggcggccgggcagaggcgcccctcacctcccggacggggcggctggccgggcaggggggcagacccccccccacctccctcccggacggggcggctggccgggcggggggccgacccccccacctccctcccggacggggcggctggccgggcggggggccaacccccccacctccctcccggacagggcggctggccgggcggggggccgacccccccacctccctcccggacggggtggctggccgggctgaggggctcctcacttcccagtaggggcggccgggcagaggcgcccctcaccgcccggacggggcggctggccgggcggggggccgaccccctcacctccctcccggacggggcggctggccgggcagaggggctcctcacttcccagtaggggcggccgggcagaggcgcccctcacctcccagacggggcggctggccgggcggagggctgacccccccacctccctcccggacagggcggctggccgggcggggggctgacccccctacctccctcccggacggggcggctggccgggtggggggactgacccccccatctccctcccggacggggcggctggccgggctgaggggctcctcacttcccagtaggggcggccgggcagaggcgcccctcacctcccggacagggcggctggctgggcgggggggctgacccccccccacctccctcccggacggggcggctggccgggcggggggctgacccccccacctccctcccggacggggtggctggccgggcgggggggctgaccccccacctccctcccggatggggcggctggccgggcggggggctgaccccccacctccctcccggatggggcggctggccgggcggggggctgacccccccccacctccctcccggacggggtggctgccgggcggagacgctcctcacttcccagatggggtggctgccgggcggagaggctccttacttctcagacggggcagctgccgggcggaggggctcctcacttctcagacggggtggttgccaggcagagggtctcctcacttctcagacggggcggccgggcagagacgctcctcacctcccagacggggtctcggccgggcagaggcgctcctcacatcccagatggggcggcggggcagaggcgctccccacatctcagacgatgggcggccgggcagagacgctcctcacttcctagatgtgatggcggctgggaagaggcgctcctcacttcctagatgggatggcggccgggcggagacgctcctcactttccagactgggcagccaggcagaggggctcctcacatcccagacgatgggcggccaggcagagacactcctcacttcccagacggggtggcagccgggcagaggctgcaatctcggcactttgggaggccaaggcaggcggctgctccttgccctcgggccccgcggggcccgtccgctcctccagccgctgcctcccgggcggcgctcgccggcgcggcggcaaagactgagacagctccgctgcccgctgaactgcatcctcccggcggtcgggcggcggcggctgcggtcggtcgcggcagcggctccgcttcatatctgcagctggggcccgcgggcgtcagcgccgcgactgtcctggctccgcactgccccgggccgcagcgcagccgcgccaaccaccagccgcggccaccatggccggacgggctccctaagccaccgaccccagcccgcggcgccttcgacccttctggggcctccggcgccgcgacctcctctgcctgaaatttcttttttcttttccttttattttattttattttttgagacggagtcttgctctgttgtctgggtggagtgcagtggtgcaatctcggctcactgcaacctctgcctcccaggttgaagcgattttttctaatttttattttttattgtttttttgagagagtctcactctctcgcccaacctggagtgcggtggtccaatctcggctcactgtaacctccgcctctcaggttcaagcaattatcctgcctcagccccccgagtagctgggattacaggcatgcaccaccttgcccagctaatttttatacttttagtagagacgggtttcgccatgttggccgggctcatctcaaccactgacatcaggtgatccacccaccttggcctctcaaaatgctaggattacaggcatgagccactgtgcccggctgaacatatttggttagtttgttcaaagcagaagaaacctcagacactgcatggttttaggctttggccctaccatcctcgtgagcttcctgtccaggaggatcatgaatgccccggttctactaagtgcggaccccaaggtccttcccacccccgagccaactgctaaattcccttactagtcctagcaattgttttgtagagtccttagagttctttatgtaaacaatcatataatttccaggggattcttcctttccaatatttatgtattatatttcatttcatattattattgtattttatttcattttactttatttttatttacttaatgtctaactgcaatggctaaaacttccaagacaatattgaataaaagtgttaggagtaagcattcgtaccttgtctccagccttgggggaaagcattcactatttcgcctttaaggatgattttattttttattttaattttattatgatttttttgagatggtgtcttgctctatcgcccaggctggagtgcagtgtcgcgatctcagctcactgcaacctctgcctccggggttcaagtgattctcctgtctcaccctccctagtagctgggattacaggcttgtgccaccatgcctggctaatttctgtatttttagtagagattgggtttcaccatgttggccaggctggtctcgaactcctgacctcaagtgatctgcctgcctcgggctcccaaattgctgggattacaggcgtgagtcactgtgctcggccaaggatgattttaactgtaggctcttcaaaggtgtccttgatcagattgaggaaattcccctctatttctattctcttctatttcagtttgctaaaaaagttctttaaatcatgaatagatgttaaaatatgtcaagtatttttctacatttattgaaatgatcattggtttttctgttatattctgttaacatggtaaatggtattgactttttttttttttgagacagggttttgctctgttgcctaggctggagtgcagtggcgtgatctctgctcactgcagcctctgcctctcaggttcaagcaattctcctgactcagcctcctaagtagctgggattacaggggtgcaccaccacatgggctaatttttggtagagatggggtttcaccatgttagccaggctggtctcgaactcctggcctcaagtgatccacccgcctcggcctcccgaagtgctggaattacaggagtgaacactgtgcctggccttacatttatttttaaatcttaaattaaatgtctttgtcagattttggtgttaggtgttgctggtttcaaagcaggggatgagaagtgtcccctcttattgtgtctgttttgcaaaagggtgtgtgagattggtgctatttcctccttgaaattataataggcttcaccagagaagccatttggaccctggagttttctctcttggaggatgtttaactaccaattcaaattcattagtagatccataggacttttcagattttgttgcattttgtcttaattttggcaagttgtagttttcaaggaatttgtccatttttctgtttgtcttgatcagtctggctggatgtttatctgttttgctgctctttccaaagaatgaaaatgaacacctgtggagcagccataagccagtgcacatccaggagcccagcccactggacctgcagcttgcagcacagccaccctgcagagcacagcctcaattagccagttcccagccaacccacggagacaggagccaggagagatagctgagttttgggggtggcttgttaagcagtaatagctgactgatacagttaatgggtatacactttatttaaccagttccctacagatggacatttagcaaagtgaattatttcgagagaagcttggctccatttaaaaaacatttctgggcttggcgcagtggctcatgcctgtaatcccagcactttcggaggccgaggggtggatcacttgaggtcaggagttcaagatcagcctggccaacatggtgaaactccatctctactaaaaatacaaaaattagctgggagtggtggtgagtgactgtaatcccagctacttgggggattgaggcaagagaatcgcttgaaaccaggaggtggaagttgcaatgagctgaaattgtaccactgcactccagcctgggcaatggagcaagactccttcttaataactaactaaataaataaatattaaaaaaaaatttctgaccaggtgcagtcactcacacctgtaatcctagcactttgggaggctgaggcaagaggattgcttgagctcaggatttcaaaaccagcctgggcaacatagcaagaccgtgtttctctctttctctctctctctctcaatatatatctctctctctttctatctctctcattttctctctctctctttctctctctctctctctctctctctatatatatatataaattccttaagatctatttctagaagaattgcagtcatggtttacatatttataattttaaaacatattcctaaattatgctcaccaaagctatgctgtttcacatttcagcaatttataagcatcaattttcctcatattttccaacattgagtgttgaaatatttaattttctgcaatctaataatgaaatgtaatatcaatttaaatttgcattcccctgagcattagaggagttgaataaacttttcatatacgcattagccatttatttttcttcttccctgaattgcccttcgtcttgtttgttctcttttgtagtgttttgtcttttcctatttgtaggagatgtttatataactggatattaatcttttgtctgctaaaagtattgtaaatattttcttgaattataagagtttctaaaaaaactttgtagcatcttttattggagaaaagtttattatatttacacagttaaatctgataattttttttaatgctattatatttgcctaagaatatttttcctattctggctgggcactgtggctcactcctgtaatcccagctctttgggaggccaaggcaggcagatcaccttaggctaggagcttgagaccagcctggccaacatggtgaaattctgcctctactaaaaataatatgaaaaattagccaggcatggtggtgtgcacctgtagttccagctactcaggaggctgaggcaggagagaattgcttgaaattgggaggcatggaggctgcagtgagccatggttgtaccactgaactccagccaggcaacagagcaagactctgtctcaatatatatatatgtttttcctattcaaaaactataaacattaatcatattttcttctgttataatactttttattgctttgggtctataaattatctgacacttattttggggttattatttttagtataagattcttttccaaaacaacaggcagttcttccaacagtgtttataatttcattacttcctctttaattcgaaatgccaaatttaaactagtttttaaataaaggttgtttctggaatttctcttctactgatccctcatggcattatatcaatattatgctgttttactgctgatttttttttctttttgagatggtgtctcactctgttgcccaggctgtagtgcaatggtgcaatctcagctcactgcaacctctgcttcccaggttcaagcgattctcctgcctcagcctccctagtagctgggactacaggtgcgcaccaccatgcccagttaatttttgtatttttagtagtgacagggtttcaccatgttggccagtctgatcttgaattcctgacctcaagtgatccacctgcctcagcctcccaaaatgctgggattacaggcatgagccaccatgcttggcctgtatggatgttttattctgatatttactcttccaaatgagcttgcgaatattaacaaattcataataaaatgtgcgtggattttgtgtgggattgtatcaaatatgtagactatttgtagagaatcatagtttgatagcattgagtcgttgcatttgatttatatcctttttttttttttttttgagacggagtcgcccaggctggagtgcagtggagctatctcggctcactacaagctccgcctcccggggtcacaccattctcctgcctcagcctcccaagtagctgggactacaggcgcccgccaccacacccggctaatttttttttttgtatttttagtagagacggggtttcaccatgttagccaggatggtcttgatttcctgacctcgtgatccacccgtctcagcctcccaaagtgctgggattacaggcgtgagccactcgtccagcctgatttatatcttgatctttagaatttcttattttaatgatcttcagtaaaaattatttggttttcttaccaaacacagcatgttctcactcataagtgggagttgaacaatgagaacacatggacatagggaggggaacatcacacaccggggcctgtcgggcagtggggggctaggggagggatagcattaggagaaatacctaatgtagatgatgggttgatgggtgcagcaaaccatcatggcacatgtatacctatgtaacaaacctgcacgttctgcacatgtatcccagaacttaatgtataatttaaaaaaattatttggttttcttcaggtaggttttgcacaattctttttttttttttttctctttttcaagagataggattttgctctgtcacccaggatggagtgcagtggcatgatcatagctcactgtaacctccaactcctgggctcacttgatcctcctacctcaacctcttgatcagctgggactaagggtgcatgccaccatgcttggctaattttttatttgaatttttttagagatgagatctcttgctatgttggtctggctagtctggaactcctgatctcaagtgatcctcctgcctcggcctcccaaagtgccgggattacaggcatgagctaccacacccggccacagttcttgctaggtttaattctagagtttgtttttgttgttctgtaatgaatctactgacatgaaaatctttttctgacatattaaggccaaaacttaggttaatagcattcatgatatattctaatttttgcaaagactgtatctacatatatggatagctgtatatgtaggaatctttagttgtaattttttttttttttgagatggagtctcactcttgttgcccaggctggagtgcaatggtgcgatctcagctcaccacaacctctgcctcccgggttcaagtgatctcctgtctcagcctcccgagtagctgggattacaggcctgcgccaccacgcctggctaatgttgtatttttagtagaaacggggtttcacagtgttggtcaggctggtctcgaactcccgacctcaggtgatcctcctgcctcggccttccaaagtgctgggattacaggataattgtttatttacttctctgtctccacttggttgatgtgttttaggaaaggaactatattttgacgacttcatgtctaacacctgcatagcacctggcacattggtagctcaaaaatcctttttacatgaatgaatgaatggaataaagggatagtgaaggacctacattgagcgatgacagtgtcttttccttcagtgcatggcatttgttgattcctttatttctgcttccttgtattttctgatttttcttttgtgatcatgtattctgttgtgatttaaagaacagaaagaaaaagatattcacttggaaaaagtagaaccataatgaaagagcaccacaaggtgtacctcatatactactagtaaatttttttctttccacttgagacagtgtctcactctgtcacccaagctggagtacagtggcaagatctcagctcaccgcaaactctgcctccagggctcaagtgatcctccccgctcagcctcctgagtagctgggaccacagacacacaccaccaaacccggctaattttttgtagttttggtagagacggggtttcgccacgttgcccagactggtcttgaactcctgagctcaagtgtaaatttttaaaatgagaaaaacaggctgggtgcggtggcttatgtttgtaatcccagcactttgggaggccaaggcaggtagatcacctaaggtcaggagttcgggaccagcctggtcaacatggtgaagcccagtttttactaaaaataccaaaaaattagccaggtgtggtggtgcatgcctgtgatcccagctactcaggaggctgaggcaggagagttgcttgaacccagaatgtggaggttgtagtgagccaagattgtgccactgcattccagcctgggcgacagagcgagactccatctcaaaaaaataaaaataaaaataaaatgagaaaaacatatgcagttcctaaaatggcttagggtgcaggccgtcacctcctgggtgattcccatttcagtggcgtggctttgtggtctgtaaatgggcttcgtcctgccttgctggtgccccttaccacccctgctgtgcagggcaagggttggcttgcctgctgctcctggctccaggccctcagcaaaggcccagcacagttcaaagggactagagggaagccagggaaagtaattctttagtctccgaggttgttttaacattatgatgatatatggcatatgttgctacaatggctgggcacatttacacggagggcagaccgggaggcccttagggctgggagggccaccaggtcaataatatatgcaaccggcaaaagaaaacatcgacctcatttcctccagagagcagacaactgtaaccctggagtcctggtttgcatgtaaataatgagcaagatactgcgtggccacttgtatcattgaggggagagtgagacaagaacaagaaagataaattagaaaaatatgagggcaccacttatggatctgtacaaggaagtgtcattcttcaggttaattttgcttcctctagaaagcagctcagtgttggtaggcttctatgtctgagattttaaaatggctttggtatgattattatcaatgaaataatcactgtcagtaacaaaaaatcagtttctcgagaggatgactgacgtgcggttgcagcatttggccccggggcccattaaatcctgaccaaagtgctgaagagttgccccacaaatgatttggctacactgggaatcacccggaaggaggccaagggtgtgtaattctggggaagtttggcggcagcctagggcctcctcaatctgaaagctcttgtttcgctttgtaaagcgtttgcttgtttctttttctttctctctttttttctttctttctttttctttcgcctgcctccctccctccttccctccctcccttccctcctctctccgtccctccttctctccctctcctgcctctctccctctctcccccctttctctttccttcctccctccctcccttacttcctccctccctcctctccctctcctgcctctctccctctctcccccctttctctttccttcctccctccctcccttacttcctccctccctcctctccctctcctgcctctctccctctctcccccctttctctttccttccttccttccttccttccttccttccttcctccctccctcccttcctccctccctcccttcctccctccctcccttacttcctccctccctcctctccctctcctgcctctctccctctctccccctttctctctccttccttcctttcttcccttcctccctccctccctccttctctccctctcctgcctctctccctctcttccccttttctctccttccttcctttcttttccttccttccttcctttctttcctttctttctttctttcgccttcctccctccctccttccctccctcccttcctccctccctccctctcctgcatctctccctctctctcccctttctctttcctcccttcctccctcccttcctccctcccttccttcctccctccctccttctctccctctcctgcctctctccctctctccccccttttctccccttccttccttcctttcttttccttccttccttccttcttccttttctttctctctttctctttctttcctttgccttcctccctccctccctccttccctccctccgtccttcccaccctccctccttccctccctcccttccttcctccctctctccttctctccctctcctgcatctctccctctctctcccctttctctttccttccttccttcctctctcccttctttcctccctccctccttctctccctctcctgcctctctccctctctccccgcttttctctccttccttccttcctttcttttccttccttccttcttccttttctttcttttctttttctctttctctttctttctttctttctttctttctttctttctttctttctttctttctctctttctttttctttctttctttctcttttctgtctctctctctctctctcccccacctttttttttcagacagggtcttgctaagttgcccaggctggtctcaaactcctggcctcaagtgatcctcctgccttggcctcccaaaggaggaattattatcactattttgccttagatgtgataatggttgtatttttacatacttatgttttggagatacctgctgaatattgatgggtggaatgatagaatttaggggatttgcttcaaaatagctaggggaggcagtagggggaggtacagaagaaatgaaattggccatgaagtgaccattgctgagtccagatgatggatacatgggggctcactatgctgttctacccttttacttgcttgaaattttttataagaaataaagcttcccaggtggttctgatgatcagccagagctgggaacccctggcttggctgatccgcagaggctgattcctagctattattctctgaccttccatgtcgcagaaattatgatggtaatcagaactggatcatgtttcctctctagtttggaggaggtcatgagataccttaacaagaaaagggtctgggggaccggcatggtgtctcacacctgtaattccataggccaatgtgggtggatcatgaagtcaggagtttgcgaccagcctgaccaacatggtgaaaccctgtctctactaaaaatacaaaaattagctgggcatggtggcactcacctgtaatcccagctactcaggaggctgaggcaggagaatcccttgaacccgagaggcagaggttgcagtgagctgagatcgcgccactgcactccagcctggcaacagagcaagactctgtctcaaaaaaaaacataaaaaaaagaaaaaaaagggtctgaagggtctggggaaaggtcccctgacaaatcagttcatccaggacatgaactgacctgcaatccgctcggaataggatgtcggatcaaaattgtcttgttccttagagaaatagcctcctttcccataaaaagacaggaggagatctatctttatttatttatttgtttttaaaaacagagtctcactctttgtccgggctggagtgcagtgacaagatcatagctcaccgtaacctccaagtactgggcttaagtgatcctcctgcctcagccttccaagtattcttgactacaggcatgcatcaccactccaggctaatttttaattttttttgtagagagatggggtcttgcaactttgcccaggctgatcttgaactcctggcctgaagtgatcctcccacctcagcctcccaaagcactgggattacaggtgtgaaccttcacgcccagctttctatctttattttgaaaagtaaaataaatacaaattattagttcattgatttattgaactaattatttattggattgctactgtatgccaggcactctgccaagctctatcgaagttctcaaagtttaatttggggcctggcatggtggcttacacctgtaatcccagcactttgggaggcagaagtgggtggatcacttgcagtcaggagttcgagaccagcctggccaacaaggtgaaacctgatctctactaaaaatacaaaaattagctaggcgtggtggcacatgcctgtagccccagctacttgggacactgaggcacgagaatcacttgaacgtgggaggtggaggttgcagtgagccgagatcgcacttcagcctgggtgacagagtgagactctgtctcaaaaaaagaaaaaaaaaagttgaatctgtagacctctgggatcccagagattctttcaaggggtctacaaggtaaaaaccattttacaatttatatttatttacgataatactaagatgtcatttaccttttattttggtatttgcacagatggtataaaaccaacagcgagtaatactgcttgtacttgacgttaatttgtcagtggcactgactgtactagaactcattgtattcttcaccactcacagtttatttatttatttttactttttattgatttttatgttttgagatagaatctccctctgtcacccaggctggagtgcagcagcacaatcatggctcaccacagccccaattgctcaggctcaagcaatcctcccacctcagcctcccgagtagctgggaatacaagtgtgcgccaccacaaccggctaacttattttattttatttatttatttatgacagagtcttgctctgtggcccaggctggagtacagtggtgcaatctcggctcactgcaacccccacctcccgggttcaagcgattctcctgcctcagcttccctagtagctgggactacaggcatgggccaccatgcctggctaatatttgtatttttattagagacagggtttcgacatgttacccaggctggtctcgaactcccgacctcaggtgatctgctcacctcagcctccctaagtgctgggattacaagtgtgagtctactcacagtttaaaacaatccactttcacttaagaatgttcctaatgaagcagtaagaattagtgttattaaatttgaattctcgagtccacttctgaagattgtgacggagtgaacacagaacaggattccgccacacactgggtacaatggcttttcaaggtgagacactggtgcagttgcttgagttgcgagctgaactagctgctttttatcatggcacactgttttacttggaagaaagttctgacacatcaaagtacagatattcagactctggtatttggcagacattttctcaaaaatgaacaaaatgagcctgtcacttcaagggaaacaactggcagtatgttttgccaatgataaaattcaagctttcaagttgagcattaggattttgggaaaacttgttatctgccaccaagagcttgacagcttctcaatttctttctttctttcgttctttcttttttgagatggagtttcactcttgtcgcccaagctggagtgcaatagcaaggtctcggctcactgcaacctctgcttcccgggttcaagcgattcttttggctcagacacccaggtggctgggattataggcgcctgccaccatgcccagctaatttttgtatttttagtagagatggggtttcaccatgttggccaggctggtctcaaactcctgacctcaagtgacccacctgcctcggcctctcaaagtgcagtgctgggattacaggcatgagccactgtgcttggacagcttctcaatatttagataccttttagatgagatcactagtgatatttttaaaatgtgatttttgatattgtataataaaactgacatttggaagttttgcatagcttagcgaaccaacattttccaaatgaccaatgcgtgatgttacaaaatcattcaaagtgcaagatggatattaccaagtaatccttctcccacctaggacacagtaagggagaaacagcagttgtcccaccctagcaaaagcaggaaaattgcaaaagcaaagagccaggaaacctcaaaagcaaactttttcttgaacctactggaaagctgaaggggcagggcaactgtgtagcctgaaatctaaggaaagacagttgcctccccagtgatagatgggacatgagcaccagcttacctgtgtgcagtacaagaggaagaggttcctggtgccatgcacgagagaaaacattatttagctaacatttttagcaaatttgctggagcctgagtgcaaactagagtaggcatataaagtcctgggcactgcagactcaaggagagttttcatagacctccagtttatgagaaagaccaggagcagagcaggacaccagagaccacctccctcgttggtacagggctagaggatagtgacaactgaagacaacgaggctcatttggaaaggagagctttatttctcataaagggttgcagcctgcagagtggccattctgacaggctgggaagcatagcctctggtcacaagccagaaacagtcacttcaagggaggagcaaagggaataggaatttatgctgagcgggatggctgaacatacatatttaataagatataggagtcatgaatatttatgaaaggagaaacacatgtgcaagtgtgcttcatgtcccttcatgggtcccatgtacaaaaacatggcagtatcagcctgattcaagggtggagttttcagccttctgatatcaaaaggtgacatgaagatgtagaaacctttattgagcattctccatggactgaccagaccatggaggtctcttatcaggtaaaaaagaaggagcagcctcaggtggttataggtgatatcagtgtggagtcttttgaaagggctggtttctgtttagcccttagggaagaaaatctaattgtagttagtgatgaagggagcgttaacaatgaggtgcatcagaccccctatcccatcatggccaagcattctgttttcaaggtgactctgcattcccttggccaggaggtggtccattcagccagttgggtgggggtgggggggcacttagaattttattcatatttctagataggattggccacatttgtgggaaaggcataaacaccatccagactcttcatttctttcttttttaaaaacaattattattatactttaagttctagggtacatgtgccaacgtgcaggtttgttacatatgtatacatgtgccatgttggtgtgctgcacccattaactcatcatttacattaggtatatctcctaatgctatccctccccccatccccgaccccatgacaggccccagtgtgtgatgttccccaccctgtgtccaagtgttcccattgttcaatacccacctatgagtgagaacatgtggtgtctggttttctgtccttgcaacagtttgctcagaatgatggtttccagcttaatctatgtccctataaaggacatgaactcatccttttttatggctgcatagtattccatggtgtatatgtgccacattttcttaatctagtctatcattgatggacatttgggttgattccaagtctctgctattgtgaatagtgccacaataaacatacgtgtgcatgtgtctttacagcagcatgatttataatcctttgggtatatacccagtaatgggatggctgggtcaaatggtatttctagttctagatccttgaggaatcaccacactgtcttccacaatggttgaactagtttacagtcccaccaacagtgtaaaagtgttcctatttctctacatcctctccagcaactgtcgtttcctgactttttaatgattgccattctaactggtgtgagatggtatctcattgtggttttgatttgcatttctctgatggccagtgatgatgagcctacctccctttattttttgagttggagtcttgctttggcacccagggtggaatgcagtggtgcaatcctggctcactgcaatgtccgcctcccaggttcgagtgattctcctgcttcagcctcctgagtggctgggattacaggcacacgccaccacacctggctaatttttgtatttttagtagagacagggtttcaccgtgttgcccagctggtctcaaactcctggcctcaggtgatctgcctgccttggcctcccaaatggctgggattacaggcgtgagccactgcacctggcccagacccttcatctctactcccctagaaaacaaaaactataagctgccatagggaagtggggagggattactgagaaagttctacctctgagacccaaggacacaggaagcatgaagtaacaagtaactgcagttttcccattaggaggggcaagagtgtggggagagcccctcgaggtgtgagtgcacagagaagaccagaaactgagggtgaggaagaaatattaagaacgacccttgggaggtaattccagggttttaggaggctgaggcagggagattgcttgaggccaggagttcaagatcagcctgggcaacatggcaaggcccagtcctgacaaaaaaaatttaaaaattagccaggtgtggtgatgcacagctgtagtctcagctacttgagaggctaaagtgggaggatcaattgcttgaacccaggagttgaaggctgcagtgagttatgattgcaaccactgcactccagcctgggtgacagagcaagacgttgtctcaaagaaagaaggaagaaagaaaaaaagaaggaaggaaggaaggaagtgttagatatgagttctaaatttattttcaaagaatcaatatgtcagtatgttcaattctttaccttctacttttaaacttaacttccttataaagcaaccttttttgattacctgctccaccctgactcatttcaatcacctgctccaccctgactcattctgattacctgctctgtcataaccatttttcctgccaaagcactcaccccgttattagccaatcagaattagtttagcctgtgcggtctaactctaccaataggggaacaacacagcagcaggggccatgtgggtcacggataagaaccccttcccctcccttgtccaagtgtgcgctcaccattgctctatctgtaagggcgcacccttctatggaagtaccttgccttgctgagaattaaaagaaaattttatatttgagtgcaattggttttgcggcactgaaactttacatataacaggaggaaggaaagaagggatggagggagggagggagaaagaaagacactgaagcaactcaacccccatctgaagcacaaggtaattctagaggaatttgaacctagtgttacactgacggaaaccatggcaataacaaaagccaaacccagattgactcctgactggattgcctcaacttcccattggttgctttccacaaccaatcagacagatttcgggccaccacttggtttacacgagttgaccaccaagtggccaatgggaaacctgtagggagtatttggacccaagaagattctgtatccgggcccttgagcccctatgctcgagcccgctcctgcactgtggagtgtactttcattttcaataaatcccttcattccttccttgctttgtgtgttttgtccaattccttgttcaaggcaccaagaacctggacaccctccaccgatgacactgagaggtgttgcaggaactcccaaatttgtgttgattaatttttgtatttttagtagagatgggatttcgcgatgttgtccaggttggtctccaacttctgacctcaagtgatccacctgcctcagcctcccaaagtaagaccgatgcctcaatgctgtgcctgcaattgcctgttcctgctgtttcagggtagttttgtttgtgtccggttcctgctgtcctccctgccccacacaggaggcctctgtgcaggacacacagccgttcctcgagagccactctgcacctgctgtctgcactagctacagaagggtccagatgagtgtctgcacaggtaggtcttgccgctgaagactaagccttgcaaagcaaaccaggagaaatggattttggtatgttagacaggcaggcagtcttcgtcctagttttgttttgttttttgcttagtaactgctattgcaaccataatattttcatccttctttccttctgaaattgtgcctcaaagagttaaagaaatcagtaactctgggcacagtggctcatgtctgtaatcccagcactttgggaggctgaggcaggaggactgcttgagcccaggagtttaagaccagcctggacaacacagtgagaacccgtctctacataaaataaaaattagctgggcatggtagcgcatgcctgtcatcccagttactcaggaggttggggcaaaaggattgcttgagcccaggagttcaaggctgcagttagtcacgattgcgcaccactgcactccaaccagggtgacagagggagaccctgtctcacaacaacaacaacaacaacaacaacaacaacaacaacaaaaccagtaagtaacagaaattcttgagtttgcaggatagcagataaggaaagaaacaacttgctgaaatgctgaaactcctttcattcgtaagataataaaactggctgaaatcagttggaacgaatgtggccaactagagtctgtgcagaaccagcttgctgacatcacagcctgaatttccatcacgtttcagataactccctctgaatttgcacacgcgaaccataagttagcatgagaagataatcatgaatcctcaaggattctgcccatctccctcttccttccaccaatcacctgctaatccaaccccaaaacttgactaataaaatgactgccttaaagccaggagggagacagatttgagctggatgcatgtctccctgggagtcaacttttcttttttcctttttgttgagagagagtctcactctgtgcccaggctggagtgcagtgaagcgatctctgctcactgcaacctaggttcaggcggttctcctgcctcagcctcctgagtagctggaattgcaggtatccaccaccacacccagctaatttttgtatttttagtgcagacagggtttcatcatgttggccaggttggtctcaaactccagatctcacctggctgacccttttaaactttacctcaaatatatagtggtggatcttttcgatttctgtataaatggattcacactctaaatatcctactatgacttgttttctttctttaacaatatgaataattggccgggcgcgatggctcatacgtgtaatcctagatggttgggaggccaaggcgggcagatcacctgaggtcaggagttccagaccagcctgggcaacatggtgaaaccctgtctctactaaaaatgcaaaaattagccaggcgtggtggtgggcgcctgtaatcccagctgctcgggagattgaggcaggagaatcacttgaacctggggtgtggaggttgcagtgagccaagatcgcaccattgcactctagcctgggcgacagagtgagactccatcttaaaaaaaaaaaaaaaatatatatatatatatatatatatatatatatatatatatatacgtgtatatatatatatatatatacacgtatatatatatacacacatatatatatacgtatatatatacacacacatatatatatatatatatatatatatatatatacataaaattattttgtcctggaggttatattttgttttactgtgacattagtaaagatacagctagtacagaagtcaatgatttcatgaatattattaaatcaaatctttacattaaaaatatgagttggggccaggcgcggtggctcacacctgtaatcccatcactttgggaggctgaggcagatggatcacctgaggtcaggagttcaagaccagcctggccaacatggtgataccctgtctctacaaaaatacaaaaattagccaagcatgatggcaggtgcctgtaatcccagctactcaggaggctgaggcaggagaatcacttgaacctgggaggcagaggttgcagtgagccaagattgtgccattttatatatatatatatatatatgagttggagctgggtgcagtggctcacacttgtaatcccagcactttgggaggccaaggcaggtgggtcacttgaggtcaggagttggagaccagcctggtcaacatggtgaaatcctgactctactaaaaatacaaaaattagccaggtgtggtggcgcatgcctgtaaccccagctactcaggatgctgaggcataagaattgcttgaacccgggaggtggaggttgcagtgagccaagattgtgccactgcaccccagcctgggtgacagagtgagactctgcctcagaaaaataatctacatatatatgtatgtgtgtatgtgtgtgtgtgtgtatatatatatatatatataaaacaagcacagaagtcaatgatttcatgaatattattaagttaaatctttacattaaaaatataagttgagttttgcacacatcgccactgcctccaggggccccatactatcagctatggtcaaccccaccaagttcttcaatgagccctggggccgcatctccatccagctgtttgcagacaagtttccaaagacagcagaaaatgtttgtgctctgagcattggagagaaaggatttggttataagggttcctgctttcacagaattattccggggtttatgtgtcacggtggtgacttcacacaccataatggcagtggtggcaagtacatctatggggagaaatttgatgatgagaacttcatcctgaagcagacaggttctggcatcttgtccaaggaaaatgctggacccaacacaaacggttcccagtttttcatctgcagtgccaagagtgagtggttggatggtgagcatgtgttctttggcaaggtgaaagaaggcatgaatattgtggaggccatggagggttttgggtccaggaatggcaagaccagcaagaagatcaccattgctgactgttgacaactctaataagcttgacttgtgttcgttttgttttgtttttgagacagtttcactcttgccatccagggtggagtgcaatgtcacaatctcagctcactgcaacctctgcctcccaggttcaagtgattctcctgcctcagcctcctgagtagctgggattacaggtgagcaccaccatgcctggctaatttttgtatttttagtagagacggggtttcaccgtgttggccaggctggtcttgaactcctgacctcaggttatccgcccaccttggcttcccaaagtgctgggattacaggcatgtgccactgtgcccagtcgacttgtgttttatcttaacctcaagaccattccttctctagctccggagagcactcctccaccccatttgctcacagtatcctataatctttgtgctctcactgcagttccctttgagctccaagttttccttattcccttccatgcctagctggattgtaaagtttatgattatgaaataaaaactaaataacgacaacaaaaaatatgagttgatttaaataaaaatattaagtaaatattagtataggtggcaagcggatatggcaaaaaaaatcaataaaatttgaatgtgaatggctacaattcaggaaatatggttttaataaaaacagatacaagctgtggcacgtgcttgtagtcccagctgacgcgcaggagggaggagtgcttgagcccggaagttcagggccagcctgggcaacatagtgagacctcgtctcaacaacaaaaatgaaaaaaatcaacaacaacagaaacacagatacatctaaaattgctctggatctttggaacaggtctgccctgaagtggtgttttatgggcctgggcactctggcacaagccctttctgggcacaaggcgaagttgatgagactcatgcttactgccagcttgctccaggccactttcagccaccagcaccatggccttctgcctccttagtctctgtaccttccctgggatttcccccaggcttgactcttctcccaactcctctgtgcatggcctgaacttgcccttgcaacctggcatggatcaagctggcttcctagtttctgccccccagctccattcacccttgggtactggcctcgcttcatcacctctttctgttatctacaccctttgccacatcactttgcagtgccctgtcaatgtgactctgggctggccatgagacctgtgttgaccaacagaaccaggctgaagtgacagtgcaccagttccagaggccctgagtgtctctataccatcttgtgcatttctgccatctctaagataaggacgaaatcagcaggtcctaggatgagggtaaaatatgtggagcagagttgcctcagccaagcctccaacctccagcagcactccagccctcccacaaactcatgaaaaataagacattattgttttttttcagccattgagctttggagtgtccatgtatcggttagctattgctgcgtatttgttgcacagcaatagctaactgatacatggacacaaagcagcagcccctggcccccacccctgttcagtgactgctgtactcacacacagagtagaaaatgcttgcacaagtgggatcaagcattttcccactttcataaccatgccccatggcgttgccactgatattgccctgcctagcactggaaagaggaggtagtgagggcaaatggaacctcttttgctcagtccagggagcaataggcagctgtcacccacaaacgacatggctcccacaatctacttcccagatcatagtcctgcctagctgggactggaggtaggatacaagttagaggtgtattccagccccagggtgctgggtgaggcctggggatgtgtccctgcccacaagatagaactggaatcttcacgtccaccagattctgggcctctctcctatgtcacagatgggaattctttccacattattcccagtgggtcttctcactcttttccaggctccttggaggtcactgccctgatgacaacatggtcttcccttcaaggaagccacgtttctaagagggctctggcatatgcattggtgagttgaagcttgacagtgttatagcttctctgctgttagtgtgaggtttgaggattttactttaaccacatggattagtcagagaaacagaatgaacaagatacagatggcgctgtagacatagctatagacctggaagaggggctttataatggagattggcctgagtgattaggagcctaagaagtcccacagtatgtcatctgcaggttgaagagccacggaagctgatggtatcattcagtttgagcctgaagttctgagaaccaggagcttcaacgtcccagggcaggagaaggtggatgtcccaggtccagaagagagtgaatttgcttttcctctgtctttttgttctatttgggccctcagtggattgaatgttgcccacctacattggtgagggcagatgttttttactcggtctactgattcgagtaccaatctctttgaaaacaccctcccagatgcacccagaaataatgttgcacctgctatctgggtatcccttaacccagtcaagctgacagctaaaagtaaccatcacaccacactttcacaaacacctgggtgcttgcggactcaccttttacaatggttttaccagcctcctccacaagcacaggcaaagtcagtttcaaggacaggagccccccattgttgctcggtgtactggcgatctaaacaaacacgtgcattatagggggtttctgtcattttttagccacctcgctttcatccctggtcctcatgaccccttgatttctttctgaggaattccctccctcccactgtgagaacagaggggccaggccctccgtctgtctcccagctctaggagagccaggggttgagccccaggccagagctcagccaatcagaggctgtcctgtgagcaagtgataccgggactgatgggatggctggagtgtgtgttgcacagatgcaacagcagcacactgaccagaccatgcccctgtgagagccggggtggggctccactgctccctagggctcccaggagctctgcctgccctcagcttcctgtccaggctctctgaaccccctcttattattttgtttaatttttaattttttttagatgaagtctccctttgttgcccaagctggagtgcaacagtgtgatctcggttcactgcaacctccgcctcctggattcaagtggttctcctgcctcagcctcccaggtagctgggatcacaggcatgcaccaccacgcccggctaatttttgtatttttggtagagacggggtttcaccatgttggccaggctggtctcgaactactgaccttaggtgatccccctgccttggcctcccaaagtgctgggattacaggcgtgagccaccacaccttgctgcaccctctcttgttgatccttcttgcttggttaggcagagacagcctccaattcttgcagctacaaggcccgcacatgaaggacaaaatgttttggttaataatgtcttcatgtgtgtaagtcctgtttttgttttccagttgaattgagagttccttttgggcaggaactcttttttccctttgtcctgggtccggtacttggcatgcagtagattctagggcagagctggaggcagggggaggctgcctagagccagagggcttgtgtgtgaggtccgcccctgcactcactcactgggggaccttggctgagtcccgcggcattttcagtctagacattgcatcaattaaacaggtgtgatgcttataatgatcaccctccttcttggcctcagggcctctgtgaggttttaatgaatgaaggctgaagaaactccacagagatggtgactttcccccagcacagctcttgccctcaaggaagagacactcgaccaaacaggcaactggaaacaggatggcttcgtgggcgtgtgtgacttacacagggctgtgcactcagaagaatcccgtgactgacttaggctctgcagctgccatcttgaaattcttaataacttttgaatggtgttgggggtggggttggaggggatggtccacactttcattttgcactgggcactacaaattatgtgaccggctctgattaaaatgctacaagaactaacatgaaactggacacagaaaccagaccccagagcacataccgtatgagtccattggtatgaagtttaaaaacagatggcactagtccaaaggattggaagttggaatagtggttaccaggactggggggaggaagggatggtggatggtgaacaaaaggaccttggagggctcctggggttctaggaatcaatcttccttctttccttccttccttccttcctctttctctctttctttctgtttttatttcaataggtttttaaggaacaggtggtgttggttacatgaataagttctttagcagtgatttctgatattttggtgcacccattacccgaataaaaatcttctctctttcttcctctctccttccttccttccttccttccttccttccttccttccttccttccttcctaccttctttccttcaacagaatcttattctgttgcccaggctggagtgcagtggtacaattatagctttttgcagcctcaacctcctgggctcaagtgatcttcctgccccagcctcctgagtagccaggactacaggaatgtgccaacatgcctggctaattttaaaaaattttttatagagaagaggtctcactatgttgcccagactagacttgaactccttccctcaagtgatctttctgcatcagtcttccaaagtgctgggattgcaggcatgagccacctcacccagccttagaaatgttctgtttcttgacctgagagctggatatacaggattgctcactttgtgaaaattcgctaaggatttgtgcacttttctgcatatgtgttaaactgcagtacaaggttaaaagaaaatgtgtgaaacgacctatacattgcaaaggaaaggccagggtgttgagcttgacccaccttggggatgctcagagaaggcttccctggagaggggtctgggtcaggtcctgaaggaggagcaagggatgggggttgggaagttttgtggctccctaccaagggatgacgtgcctgtctggcaggagctaggctcatgcatggctcgggagagcacctgcttgtactgagtctggctctgcctgggagcttgaggatgcgaatgaattggagacacaaagaccagcttgtgggggccgtggactccactctctgggctcgagactccagctgcagtgtggaggacagcctggggtgggagatgggaggcagggagaccctgcagaggctactggacttcccaggtgagcagtgatggtgtcttgggctgggggagtgtagacaggagaatggattctggagactttattccagtggtagctgtggtggtcttcacataggatcacaaattccttggcatttgtcccatcaagagatgaagtctaatttcatccctcttttttttttttttttttctgaaatggagtcttgctgtcttgctcaggctggagtgcagtggtgcaatctcggctcactgcaacctctgcctcccaggttcaagtgattcttctccctcagcctcctgagtagctgggattacaggcacatgccaccacacccggctaatcttttattttagtagacacggggtttcaccatattggccaggctggttttgaactcctgacctcaggtgatccacctgtctcggcctcccaaagtactgggattacaagcatgagccactgcacccggcttttttttttttttttttttttttttgagacagagtctcactctgtcgcccaggctagagtgctggagtgcaatggcgtgatctcagctcactgcaacctccacctcctgggttcaaccaattctcatgcctcagcctccccagtagctgggattacagacgcctgccatcatgcccagctaatttttgtatttttagtagagatggggttttgttatgttggtcaggctggtctcaaactcctgacctcaagtgatctgcccacctcggcctcccaaaatgctgggattaggcgtgacctacggtgcccggcctaattccatccctcttgaatgtgagctggccttagtgacttgcttctgatgagtagaatgtggctgaagggatactacacgacactccaggctagattagaaaaggccatgccacttctgtctggctcccttggaactcaacaggcgtgctgcaaagaagcccaggctataaggcaaggccacatacaggtgatctggttgactgccctactgagatcccaggtgacagttaatctcaagtccagatatgtgcaagcagaagttttcaagatgaccgcagctgcatgagcctctgaatgagagctgcccggctgcctggctgggagcggtgatttttgccactgagtttggctggtttgctagcagcaagaaaacagcagcctaggctgtttcgaggaatcactagagaagcttaaaaacttcccaccgcccaggtcacgcccaagcattatttttcggagctcccaacatgcatccaaggctgagaaggagtgcaggaggccaaccctgaggcccctgagcctcagtggagacagcagtctgggccgatgtcacgaaacgcccctttcctttccaccacctcccttcactcagctctcttttgtctccgcccacttgtttccatcttcagttcctggtagatgaaagggatccatttaagtggcagggactttgaaatcagtgtgtcagtccctgatgcttgtttattttcaaagcaacataggagaatggatgtggaggggaagcggggaggctctcaagggcagtagtgggaataggattgccagataaaatacaagaggctgtattaaatttgaatttcagataaaccatgaattttcttttcggtagaagggtgctccaaatattacatggacatacttatactaaaagattacttgttgtttatctgaaattcaaatttaatcgaatgacctatatttgtatttgctaaacctggcaactctaagtgtgaagccaggtcaaggtgacacccagaactcatttagggacatttgcagactcccaagttccttcaccagcaaagtaggaaacctctcaggaatcctcaggctcttcctcttatttagagaaagtgaggctccaagacaggaagtaacacattcaaaacaggcaattcttggtttgcacattatcatggtcactaaacacatgtatactgaaaccgtgttcttgctttgctgctatgaatatttgcatagaggtttttgtattgacacaaattttcaactcagttgggtaatgcctgggattgtgattgctgggttgtataagtctatgtttgactttgtaagaaactgccaaactgtcttccagaatggctgtaccattttatcttcccaccaggaatgaaagagagtttcaatttctctacatccttgccaacatttattttccattaattaaaaaaaaatttaaggctgggtgcggtgactcatgcctgtaatcccagcactttgggagattgaggtgggcagattacttgaggtcaggagttggagaccagcctggccaacatggtgaaaccccatctctactaaaaatacaaaaattagcggggtgtggtggcaggtgcctgtaatcccagctacttgggaggctgaggcaggagaatggcttgaacccaggaggtggaggttgcagtgagctgagatagtgccactgcactccatcctgggccacagagtgagactccatctcaaaaaattaaagaaataaaataaaaaaataaaaaataatagctatcctagcagctgtgagatggtctgtcattgtgattcagatttgcatttccctaataattagtgatattgagcatcttttcatgtgcctattggccatttgtatatcttctttggagaaatagctatgcaagttctttgctcattttggggttttccatgaaactcctacaactcaatgacaacaaaaaaacagtgcaatatatatatgcttgatattaaacccttatatataagatacaagatttgcaagtgtttcttctcgttctgtgtgttatcttttcactctcttgacagtgtctctttttttttttttttttgagactgagttttgctctgtctcccagggtggagtgcagtggtgtgatctcagctcactgcaacctctgcctccagggttcaagtgactatcctgcctcagcctcccaagtagctggtactacaggtgccacccaacaccaggctaattttttgtatttttagtagagatggggtttcaccatgttggccaggctggtcttgaactcctgacctcaagtgatctgcccacctcatcctcccaaagtgctgggattacacgcatgaaccaatgagcccggttgatagtgtcctttgatgcataaaagtttttaattttgatgacatccaatttacagtttttttcttttgctacctgtgcttttggtggcctatttgagaaaccattgccaaatctaagatcatgattgcccctatggtttcttctgtgtttgactttaggtcttacgttcaggtctttgatcaatcttgagttaatttttattcatagtgtaaggcaagggttcaacttcattcttttgcatgtggatatccagcttccttggcaccatttgtgttttttttttccttttccatatatattcttcttatgtaaggcaccatttattaaagagactgtccttttcttattgaatggtcttgaaattctcgtcaaaaatcagtacgcgagagggtttattttctgggctctttattctagcctattggactatatgactatctgagaccacaatgttttttgttttttttgttttttgagacaaagtcttgctctgtcatccaggctggagtgcagtggtgcgatctcggctcactgcaacctctgcctcctgcattcaagtgattctcgtgcctcagcctcccaagtagtagacaggaatactactaactgccaccatgcctgtcttttttttttttttttctgtagttttagtacagacagggtttcaccatgttggccaggctggcctcgaattcctgacctcaagtgatctacctgccttggcttcccaatgtgttgggattacaggcatgagccatctgcctggcttcatagtattttgattactgtagctttgtagtaagttttgaaatcaggaagtatgagacctccaactttgttcttctttttcggttattttggttatttggggtctcttgaaattccatacaaattttaggaccagtttgcctacttctgcaaaaaaaatgccattgggattggataggaattgcactgaatctgtggatggctttggagaacattgttgtattagtctgcttgaactgctataacaaaataccatgacaggtggcttaaacaatagaaatttatattcctcacagctctggaaactaaggatccatgatgaaggtgttggaaaagccagtttctcatgaagtttctcttcctggcttgtccatgaccaccttcttactatgtccttggatggtctttccttgcatgcagagcaagagaaagctctctggtatctctgccaggatagggacactaatcctattgaaccaaggccccaccttcatttaacattaattacttccataaaggccctatcttcagaaacagtcccattggtggttagggcactgacatatgcattttggaagaacactaacattcagcccataacaattgtcatcttaacaatattgtcttccaatccatgaaggcaagatgttcttctgtatatttctgtttaatttctttcagcagtgttttgtagttttcgatgtacaaacttgctcctccttggttaatttttttactaaatattttattcttgatgttactgtacatggaattgttttctcaattttcttttcagattgttgtttcctactacttagaaatatatatcctactatatagaaactgattcttgtgtgttgattttgtatcctgcagctttgctgaatttattagctctaacagttgtgtgtgtgtgtgtgtgtgtgtgtgtgtgtgtgtgttgggtgggtattcattaggattttctacatataagattatatcatctaccaagagagataatattacttcttcttttctaacttggctgcctttcatttctttatcttgcctagttgctgtgactagaactcttagtactacgctaaatagtagtggtaaaagtgggcatccttgtcttgttcccaatttagaggaaaaaaatcttcagtctctcattattatgttagttatgggcttttcttatatggtcctaataacgttgaagaggttcgtttctattcctactttactaagtgttttatcttgatgttggatattgtcaaatgctttttcggcatcatttgagatgatgattatgatgatgatgatgattattattattatttgagacacagtcttggtctgtcacccaggctggagtgcagtggtgtgatctcagcttactgcaacctccgcctcccgggctcaagtgactctcctgcctcagcctcccaagtaactgggattacaggtgtctgccaccgcacccggctaatttttgtatttttagtagagatggggtttcaccataatggccaggcttgtcttgaactcctgacctcaggtgattcacctgcctcggcctcccaaagtgctgggattacaggcgtgagccaccgtgccaggcccatttgagattattatgtggttttccccccttcattcctttttttttttttttagactgagtttccctcttgttgcccgggctggagtgcagtggcacgatcttggttcactgcaacctctgcctcccgggttcaagcaattctcctgcctcagcctcctgagtagctgggattgcaggtgcccatcaccacatccagctaattttttgtatttttagtagagacagaatttcaccatgttggccaggctggtctcgaactcctgacctcaggtgatccacccgcctcagcctcccaaagtgctgggattacaggtgtgagccaccacacccggactacatcgatttatttttatatggtgaatcaccattgtgtctctggaataaattccacttgttcatggtatataatcttacaaatacgctgccaaattcgttagtattttgttgagaatttttgtgtttatgttcataaggagcagtggtctgcagttttcttttctctcagtgtctttgtcttgctggcctcatagaatgtgttctttcctcttcaatctttagaagagtttgagaaggatttgtgttacttctttaaatgtttagtagaattcatcttgaaacaatctgttcctgcgcttttttgttggaaactttttgattactgattcaatatccttacttgttatagatccaatcagattttctatttcttcttgagttagttttggtagtttgtgtttttctaaaaatttgtacatttcatctaaggttttctgattttttggagtacaattgtttatagtattatccaatttatttctgcaaaacagtactgtctcactttcatttctgattttagtaatttgactcttttctctttttttcttagtcaattttgttgatctttaaaaacatcaacttttcactgggtgtggtggctcactcctgtaatcctagcacttttggaggctgaggtgggtggattgcctgagcccaggagttcaagatcagcttgggcaacacggtgaaaccctatctctactaaaatacaaaaaaattagccaggcatgatggcgtgtacctgtaatcccagctactcaggaggccgaggcaggagcattgctagaacccgggaggcggaggttgcagtgagccgagactgtgctactgcactccagcctgggcaacagagtgagactcgatctctttaaaaaaaaaaaatcaacttttattttcattgatttcctctatcatttttctgttttctgttttgtttttctccactctaatctttgttattccttctttctttttcttttcttccctttttttttttttgagatgaagtcttgctctgtcacccaggctggagtgcagtggtgccatctcggctcagtgcaacctctgcctcccaggttccagtgattctcctgcctcagcctcccaagtagctgggattacaggtgcctgccaccacgcccggctaatttttgtattattagaagagacggggtttcaccatgttggccaggctggtcttgaacttctgaccttaggtgatccacctgccttggcctcacaaattgctaggattacaggcatcagccaccatgcctggccttattccatctttctgctagctttggttttagtttactcttctttttctagttacctaagccacatagttaggttattgatatgttagtttgctagggccatgataacactttatcacgaagtgagtagcttaaacaatagaaatttattttctcacaattctggaggctggaagtccaagatcaaggtgtcagcagggttgatattttctcaggcctcaccccttggcttgcagatgctgccttctcactacaatcccacgtggtttttcttatgtgtacacacatgctactgttcagatctcttcttctctgttatgacatgaggtcttgctctgtagcccaggctgtagtgcagtggtgagctcatagctcactgcagcttcgacctcttgggctcaagcaatcctcctgccttagcctcccaagtcgctgtgactacaggcatgtgccaccaaacctggcttatttttttttaattttatttatttatttatttatttttagagaccaggtctcactatgttgctcaggatagtcttgaatcctgggctcaagtgatccacctgctttggcttcccagggattggtagcataagtgctgggattacaggcataagccaacatgcccatattattttcttactttccatcctttcgaatcttttgatccaaagtaagtctcttgcagacagcatataaattaataatttttagaaatccattctatcaatctctgccctttaattagacagtttagtccatttacatttaaagtaattaccaataaaggatttaattctgccatttatttaatagctatttgcttttctgtacattttttaaattttgttcctcaattcctccactactacatttttttggtatttaatagattttagtgtatcattttgattccttttttctttccctgtctgtatattttttagttattttcttagcggttgccttggggatcacaattagcatcttaaatttataacaccctaatttgaataatactaacttagttttaagagtatacaaatactttgctcctatacatctctttccctccctctttatattattattgtcccagatcatatctttatacattctgtgcccattaacatagatttataattattgtttcatgcatttgccctttaaatgataggtgaaaaacaaagtattatgaacaaaacctacaataatactggcttttatatttactgatgtatgtagttactatttttatcagtgttctttttttttctcatcatggctttgaattactatcaagtttcctttcatttcagcctgatggattcattttagcagctcttgtagagcagggctactagcaatgagctttctctgcgtttatttatctgaaaatgtcttaatttctcctttattcctgaaggatagtttgtctggtaggaaattcttggttgacagtcttttttttttttttccccaggactttaactgtgttattccactgcctctgggcctctggttccttttcttttcttttcttttcttttctcttttctttttttttgagatggagtctcacactgtcatccaggctggagtgaaatggtgccgtcttggctcactgcaacctctgccttccaggttcaagcaattctcctgcctcagtctcccaagtagctgggactacaggcacccgccaccacgcctggctagttttttgtatttttagtagagacagggtttcactatgttgaccaggctggtctagaatgcctgacctcatgatccacctgccttggcctcccaaagtgctgggattataggcgtgagccactgtgcccggcacttaaaaaaaatttttttttgagatggagttttgcttttttagagttttgctcttgtgcccaggctggagtgcagtggtgcaatcttggctcactgaaacctccacttcccaggttcaagcaattctccagcctcagcctcccaagtagataggattacaggtgcccaccaccgcatctggctaatttttgtatttttagtagaatggggtttcgccatattggtcaggctggtctcgaactcctgacctcaggcgatctgcccacctcggcctcccaaagtgctggaattacaggcctgagccactgcacccagcccctctatggtttctgatgaaagcttagctattaatgttactgaggactccttgtaccttacaagttgttcctctcttgctgctttcaagattctctttttgtttctgatttttgacaatctggctgtgagtttcagtatgaatctctgagtttctcgcgcttgtaatttgttaagcttcttggacgtgtatgttcatatccttcatcaaatttgggaagttttcagccattatttcttcaaatttctttttctgtcccttcctgttcctcttctccttcaggaacttctactatgcatatgttgatatatgcttgatggcatcacatggatctatcaggctctgttcatttttccttttcttttttttgagatagagtctcactctattgcccaggctggagtgcagtggcatgatcttggctcactgcaacctcctccttcttgattcaagtgattctctggcctcagcctccccagcagctagggttacaggtgcgcgtcacaatgcctggctaatttttgtattttagtagagatggggtttcaccatgttggccaggctgatctcaaactcctgaattcaagtgatccaccctcctcggcctcccaaagtgctgggattacaggcatgagccaccatggccagcctatttttcgttatttatttttctctctttacaactggacaatttcaattgccttatcttcaagttcactggttctttcttcttcctgattcttcagatcagctttttgatctctctagtgaatttctaagttcaagctattgtacttttcggctccaggatttctattttgttcctttttataagattaaactatctcttcattggccttccctatttgttcatatattattttggtttcctttagctcattgggtgtaagacagttgatttaatgtctttgactaatgtttccaatgtaaaggcttccttggggatggcttctattgaattctttttttccccctgtgaataggctatactttcctttttctttgtatgctttgtaatattttgttgagcacttggcattttgggtattattgtagtaactctgaaaatcagattctcctcctcttcagggattgctgatttttgcttgttgagggttgcagccatctgtttgtttagagacttttccaaactatgtttgcaaagtgtgtagtccttattgcatgtggttactgatgtttttgtttcataatctttacaggcaaccagtgacctggaaatgatatctgtaaatttctggctacaaaaaggtgttctttactttcaaatctcctgatggatgctgccataggaagcacaagagggctgaaaccaatacaggagtctgtgctaatccctcaggactcaaaaatgccccaatttttggaggacaagggtcatcttgcccaccttgcaaccagccagccattccaggaaagctattcctgcagcctcatggtagggtgagggctgagaaatggggcatggcagctgttttgcatccaccctgttgctgttctcttaccaacaaccagcagcctcttttttcatcaagaactcccctggctgtttattcatgtctcatgaggtttgcctgtctaattttttgtatctttagtagagatggggtttcaccatattggccaggctggtctcgaaatcctgacctcaggagatccatctgctttgggctcccaaagttttgggattacagatgtgaattattgtgcccagccaaggctgggtaatttgtaaagaaaggaggtttatttggctcgcagttctgtgggccatacaagcatgtggcaccaacacctgctcggtttctggtgaggcctcaggaagcttccaatcatggtggaaggcaaatggggagctgcacgtcacatggcaagtggaagtaagagctagggagcaagagaggaaggaggaggtgccaggctcttttaaacaaccagctttcatgtgaactcattactgcagaagagcagcaaaccattcatgagggatccgcccccaagacccaaacacctcccactaggccccacttccaacattagggatcacgtttcaacatgagattttgagggaacaatatccaaaccatgttagtggccctctattgactccaacatctatgaacagggctggtgcttgccttggtcaactcttgtctcccattcccagtggggggcctggcacatgaagaagggattaaccaataataagtaataaagtaataaggtaataaaataatatttactttttttttttgagacagagtctcactctgtcacccaggctggagtgcagtggcaccatctcggctcactgcaagctctgcctcccgggttcatgccattctcctgcctcagcctcctgagtagctgggactacaggtgactgccaccacacctggctaattttttgtgtttttagtagagatggggtttcaccatgttagccaggatgatctcgatctcctgacctcaggatctgcccacctcagcctcccaaagtgctgggattacagacatgagccactgtgcctggcctaccatttttttttttttctgagaggagtttcactcttgttgcccaggctggggtgcaatggcatgatctcggctcactgcaacctccacttccagggttcaagtgattctcctgcctcagcctccccagtagctgggattacaggcatgcaccaccacacctggctaattttgtatttttagtagaggtggggtttatccatgttggtcaggctggtcttgaactcccgacctgaggtgatttgcctgccttggcctcccaaagtgctgggattacaggcgtgagccactgcgccttgccaatttttttttttttttagacgaagtgtcattctgttgcccaggcaggagtgcagtggcatgatctctgctcactgcaacctctgcctcccaggttcaagcgattctcctacctcagcctcccgagtagctgggattacaggtgtgtgccaccacggcggctaatttttgtatttttagtagagatggggtttcatcatgttggccaggctggtctcaaactcctgacctcaaatgatccgcctgcctccacctcccaaagtgctgggattacaggcatgagccactgcgcccggccaaagctgatcatttgaaagtgtgataagtgctacaaagaaaatttaaaaagtgaggtgagggcagatgcctagaggagaggggaggggcttttgtggacaggagatcaagaaagccctgttattatttgaactgaggcctgagtaatggcaaggaggcaaccatggaaagatatgggagaaatattgcaggcagagagatcagcaggtgcaaaggccctgaggcaggaactagtctggagtatctgaagaagagagaaattgttgtggttggcttgagtggtagggggcttggttggaggtggggaaggtgggtccgacaatgctgaattctagtaggatgtctggatttgattctggttgctgtgggaagccatggagggccctagaagggagactgacatgacctgatcccctttgaaaagctcacccagactgctgagtggataatagtttagaggtgtgcgaattggatgtctttggctgctcatgatagaaaattgtcctggtcatttagaaaatttactggccttttaaacgggaagttcagaagtgatgcagactccagagctggttgattcagccctggatcaagttctgtgatgctgtcaaggattgggttctgttctcagctctgctgaccacagatcgcacttcattctgagtactggagtgtctaggtggtctggggggctgtctgatacacatggggctacctgctttgcacttcctggccaaggggatagactgattccttatgggagcacttttgaagaatgaggaagaaccttctcaggagaggcgtggtggctcttgcctgtaatcccagcactttaggaggccaaggcgggtggatcacttgaggccaggagtttgagaccagcctggccaacatggtgaaaccctgtttctactaaaaatacaaaaattagccaggtgtggtggcacgcgcctgtagtcccagctactcaggaggctgaggcaggagaatcgcttgaacccaagaggcagagggtgcagtgagccaagatggcaccattgcactccagcctgggcaacagaggaaaaaaaaaagaaccttcccagaagcctccaggaagtctctgtttggacgacatcgcacacccattcttgaaccaactatttagaagggagatgcatcaccccctttgcctggagctagggggtgggtcagcttcctacaggcacaggactatgtggtcgcgggttaagcccctaaacgaggggaagtggggtgggcagcagccgatctccattacaagggacaagagtaggggcagcaaggccagatcaatggttgctgaggtggctggggatggagagaggatggtggtggtagaagagatggtaacaatggtcaggtcctggctgttccagaggtgatgatggttggatatgcagtgaggaaaagacaggaatgaacatttatcttttcccaagttgtccttgctttcttcctttgaagccataaaaaggaaaaaaagggtggatctggacttgggagctgggcaggagtgagggaagagaagcagagcaagcaggcacaccaggctgtgactctgcaggcatctctctgcctagacttgtctgtatgatgtggaacgaacacgacccatctttactgctagcgactgcagcagataaggcaaggccactttcacgcagttaggttaataggaggctgtacaaagggctgtaggaggaagtgggcacaggagttctaaaataattggaacggccaggtgtggtagctcacacctgtaatcctagcacttcagggaatccaagacaggaggttagctaagacaggaggctcgcttaatgtcaagaccagcctgggcaacatagggagaccccgcctctacaaaaaatagaaaaattaacaggatgtgttggtgcgggccagtggtcccagctactcctgaggctgaggtgggaagatcgcttgagtctaggagtttgaggctgcagtgagaaatgatggcactactgcactccagcccgggcgacagaccaagactcagtctcttaaaaaaaaaaaaaaaaaaaagaaaagtgggggcaaagttatccttggaaaatttcttagtccattcatagcagcatattaaaattagtacagtagcttaatttatataagagaaaatacaatgtgtacagtaattaatgaacatgcaaaatataattgtatatttcaactcactaaaaaggcacagaaagagttgaatttgctaaaattaaatgtgcttatgaaacagctctagtacatgaattaagctcctagatacagatgcagcgccaaacgacggggagggagatggggcactcaaggcgacacgcggctcttgttgccgagcgtttcctgggcgtggagcttctatagaatgtaagctttttttttttaaggttccaaagcctatatttagtgctttcatatacgtaatctcaaaaaaaaaaaaagaaagaaatatcggcataaaatgtaagcttccagagggatacaaacgcagcccagcgcggacaccgccagccccagccacgcggttcgcatcaagcgcactcccctgggggcggggcctgcgcgagctgggcgtgtcgggggcggggcctgcgcgcttgcttccggcgtgccgcgagaggcggggcgtgtggggaggcgcggccgccacgcgacgcctggctgggcccgcaccggagaggcgtctcggtacctggcaggcggcctgctactcggagcccgctgcggggcggcggcggcggggacatgcacgtgtgagatgcggcagcgggcggcgcggacgcgaacagcagcggcggcggcgggcgcggcctcctgggcgcggggcgcgcggtgcctgagggcgggcgcgcgggcgctgggcaactgccggccgcgccgcctgcgcaggcgctggttcaggactcacacgccgcgctgaggcccgcgggcccgtcatggaggcgcccaccgtggagacgccccccgacccctcgcccccttcggccccggcccctgccctggttccgttgcgcgccccggatgtggcgcggctgcgcgaggagcaggaaaaggtaactagcagccccgcgccgcttccgcctccgcccgccgggctgcccctgcctgtgctctgggccgccgccccgcgtggcctaggcccagctgcccgggcccccggagggaacggggataaacttttgtcacgtgcttctgttgtctttgtctgcagccctttgacttcgcagcggagtgaggggtgtgcagcccgttcgcctgcccaggaaagggggcttctgagctgaaggcgtgcggcagcgcgtgggaatttgggggcgggggcagcacgctgtcaacggaagcgttcgccttaatatttgtagcttgtaatgacctaaacattgcttaaaatgtgtactgtttgttgctctttgattgcacggaaaagttttaccgcgtttgtcatgataatgcttcctgtgcaatatttggttatttaatatttgtcacaatataatgccatttaaacattaaaaaaaaaagagagtctcactatgttgcccaggctaatctcgaacttctggcctcaagcgatcctccccctcctacccttccccacctcgcctcccaaagtgttgggattataggcctgagtcaccgcacccggctcatttttacaaattttaatttcatcgtataataaatgagttttaaactactggtgaaaagggtacaaagttttgtgtttcctagtgggactttatataaagaagtattcccaatttaagaaatagttttattgttaaatctgatttttctgtggattctgtggtctttcagattgattctgtcccctcaagtgtcttgaaattgttactttgaaaagcagtatttaatttgcttaaaatattttatgtcatgtttggaagagcatggattataaagggttaggaagttgcttcaacactataagcagtttaaaagttcttaactttttaattgaacattcctgtataagaacgactgtttacatagatacaaaaatatactcagttctactagatgggggttttgatagaacttaaaaaaccctcgtttgcttggaaaccacctgttgggatgaactgcgggaatctttctttgttctggttggtttaaattattttgtgggttggattttcatttctcagccatttttctctaataacgcaactgttaggtttggaagccatgttttcaagatgaaggtttaaaaatccagtggctagggtggtgactcaaacctgtaatcccagctgcttgggatgtcaaggtcgtggaattgcttgaagccaaggagttcgagatcagcctgggcaacacagggagacctccgtctatacaaaaaaatacaaaaaattagccgggccatggtggtgcacgcttgtagtcccacgtacttgggaggctgaggtgagaggatcacttgagctcaggcgtttgaggctgcagtgggccatggtcatgcaactgcacttcaccctgggcgacagagtgagaccctgtcattcatatatatatatatatatatatatatatatatatatatatatatatatatataaaacttaactagtttggcgtctttaaattagaagacattaatgtatttttttaaaagagaaagatagaaaaagaagaaagaaaaaacagcccctcatgaaatcttactccttttgccaaaacttggcattttttattctttcagagaatgtgacacagaccctcagaggatggtgtttctattgcctttcctctgctgcagtgggttaatttcacctccttcagtgtataatacgtgcataatgctgacttgatatgttttctgccatttggcatattaaaaagatatccttagttttattctgatgttagtgtgactgaaatgcaaaggatactttttggggtgctctgaacagctttctggtatcgtgttgagttacattggaagagagagtaactgctttttcagttacagtcttgtggcaaactgaatgactgttttctgtagacattgactgtgctaccaaattatttttctgtgttgtgttaatgttaattcggcacacaaaataaccacgtatatctgtcatgggtgtgtaaaattatccccagttcaggaaaaagcgcgtcagtatttaatctatctttatttaatagaagcatttgcttcagtggacaggagacccacaaggccacaaaataaactgattagatagctgcactgtaattatagtgtagtacaggaaaactacccagtaaatcggcagtgaaaattttttgtgaagcaatttatttaggctttaaagctggcccagttgtgggagtacagtgagttctagtaaagtagaagcgtagtgacatcctgagtgtagaaggggaaaatgtcatagtagcttcatatgtggcacttagtattcctttatgaaagatgaatcaaacatgcttttaagctcttggcctttccctacatgggttttgtgagacagagttaaactctgcagaaaatgatttgaatgactgttctcagttttccctgagagggtacctacctagttggctgtagatgcagagagagaaatgagttccttacacacagtgggtgccttaggcttagggcataatcttctctgggagccttgattgagaggggctggtaggtaatgtggcttaaatgttgctcattagttttgctctttctttttttccaaattcagctaaggagtataacaagttttacgctctctctctctttttttcttgtatgttctctggaacatggaataaaaaggacaaaaaattggcaacctgaggaagaggacagacaaggggcatgaacaagccacaacctctaagtgacaatatctgtagtcagcggttaggatcaaatattttaacattgctttcacttacagtcaatggtgaaacatttccaaaacaatttattttagttagaacttcggtttgtttctattttgatctagcaataaaacatgtaagaaacattccctgcagctttgtttataaagagaaaaactaaaagtctgacattgggggattggttaaataaatcaggagctgttacgtaggcattgaaaactaggacagtatgtatagggtggttccagttacgtttatataaatatttacacattttacataggaaaacaccattgttttaaaagtacacaattttattattttacctaaaagtttgtaaaattggatgggatttttttttttccaaaaaaagctattgataaaacttattttaattttaacgaaaattggaatgttactttaattgcaaaacactttctgagcctgaaaaatggctcttggctggtttgaatgccggttaggcaggtttatttcttggttacttcagagctgatatatataatttattcaaacaaccatcttccagttgatttccttcccccccccaaaggttttatttaatcttcatttgttataagatacagggagaggagagaaattcagatcatcctttttttgtctttaactaaatctgtttttactaacagcagtaaaatatttgttggaaaaatggaagcttaacctgtctagactgtgacctataccataaaatgtgtggtctaggactgttgtggagtgtcttgggctgttcagggaggtttccttgtactaagatcttgttaaatctgattctaagaattgcattatgttgaaatttttgtttcttggctaaggtgatgtttctgagatacctgtattttatctctagatactattagcttttattagcagaactactgagattttattgtaatattttaaaaagtggtggatccagtatcgtttttataggcttatttgcaggataatagtaagattagaaaattcattaggataatatatttataattgagtgcctcatgtagttctcacttggaattttggaatagcttatacttcctgatatagatccttggggaattaaatgcattaagagtaaatattttaaattttttataaagcagaacagctaatttaacttaatggagggttttcatatttcttgtgataaactaaactgcacatagtttaaagaactgtcagccacgtaggccatataacagctattctttccaagcctagaatccatgccatagaatttatgtaacaaatatttaatgagtatctactacatgccaggcatgttctgctgagtgtgcagtaatgaacaaaatacagcaagttctttctttcatggttacactctaggggtgaaggcatgcagttacatagccttaccttgggtgtttggtaggtaaggctaagtagaaaaacaggaaggtaagaggcgtgtagagaatgagggatgtgagtggagggatggtgtcttctgtaagccatcagagagggcttctctgttaggttccatttgagcagaaacttgaaataagtggggagtgagctgtgtggatatatggaggatattttagagaagagctttctagccagtatgagagcagtaccagatcattgtaagagttttggttttcatatttgtgagatgggaaacgattggaatgtgttttgaggctgatcttaaattatatccatttgtcatgcatatgtgaagaaatggacggatggaattacattatagggagcaactctgtgtgccacgcattgtgatagatgtttacagatccgatcttagaattttcattaatactgtttatttttcagatgaacagtttgtttctagtttttgcctggaactttctcatggcgtgtttgtgtcttcagttccacttagaatgctttttctaaggtggttataccagtttaccgcttgctagcagtggacagaagttctccctgcttcagtctttaccaccatgtgtcttttcatatttgctagccaatctagtgatgagtaatgaggttgatgaccttttcagatgtttattggctacttggatttttgtgttttgtttttgtgaaatacctgctcatctgttaactactttctattgggatgttagttatattctaattgattcatagtaatgactgcctttccaattatatattgtaagtttcttccctggtctgtggcttgacttggagcacttacagtggtgtctgtcctttgatcaacagacatttttaattttaacaattgtttccttcatggttagtgttttttgtcttatttttaagaggtctttcttactacttttctgaagatatcctcttatattgtctaatagaagctttactgctttgcttttcacattgagaatctacattctacctggaattggctttgtatatgggggagattgaggtcaggtttcatttttactgtatggatacctagttgtcccatcagcatttattggaaagagtgtcatgtctccaccgcattgtcatctttgtcataaatcaggtgactgtgtaagtagatcagtttcttgactgttctgttggcttgtctgttcttgcagcaaacctacactgtctaaatcattatgactttgtgttatcttggtacctggtacatggtggtgtagttttagttgtggttcctcaagattgcctttattttctcctttccagtccgtatgctgtttctttctttttcttgcttttgatactggccagttcaagtgctggtagtgggcatcaggggtcaacttttaaacatttaccattaagtgtggtatttactgtgagtaatttttgtatttgcttttatcagattaaggaaatttccttatattccaagtttgctatgagtttttatgagtgggtgttgaattttagaaatgctttttctaaattgatttaattatggtaatttattgaaaagagtatatttgttctgtaagttctgtaacttcaataagtaatgttgaagttacttttttttgccttcaagcatctgtttaacaaagcacatcttgcaccacccttaatccatttaaccctgagtggacacagcacatgtttcagagagcacggggctgggggtaaggttatagattaacagcatcccaaggcagaagaatttttcttagtacagaacaaaatgtagtctcctatgtctacttctttccacacagacagcaacaatccgattcctttatcttttccccacatttcccccttttctattcgacaaaaccgccatcgtcatcatggcctgttctcagtgagctgttgggtacacctgccacacggggtggcggccaggcagagggagtcctcacttcccagaaggggcggccgggcagaggcaccccccacctcccagacgggaccgcggccgggcggaggcgccccccacctcccggacggggcggctggccaggcgggggctgccccccgcctccctcccggacggggcagctggccgggcgggggctgccccccgcctcccggacggggcttctgccgggcggagacgctcctcacttcccagacggggcagctgccgggcggaggggctcctcacctcccagatggggcggctgtggggcagagggggctcctgacttcccagatggggcggctgccgggcggaggggctcctcacttttcagacggggcggccgggcagagacgctcctcatctcccagacggggtcgtggccgggcagaggcgctccccacatcccagacggggcggcggggcggaggtgctccccacatctcagacgatgggcggctgggcagagacgctcctcacttcctagacgggatggcggccgggaagaggcgctccccacttcccagactgggcagccgggcagaggggctcctcacatcccagacgatgggcggccaggcagagacactcctcacttcccagacggggtggtggctgggcagaggctgcaatctcggcactttgggaggtcaaggcaggcggctgggaggtggaggttgtagccagccgagatcacgccactgcactccagcctgggcaacattgagcactgagtgaacgagactccgtctgcaatcccggcacgtcggggggccaaggctggcagatcactcgcggttaggagctggagaccagcccggccaacacagcgaaaccctgtctccaccaaaaaaatacgaaaaccactcaggcgtggcggcgcgcgcctgcaatcccaggcactctgcaggctgaggcaggagaatcaggcagggaggttgcagtgagccgagatggcggcagtacagtccagcttcggcttggcatcagagggagaccatggagacagagggagagggagactgtggggagacgggagggggagggggagggagaggttacttattttttaagaaaggcacagttgtaagaatatgtttgcttgtatagccgaaggcacattccgttttgtaggtaggtgagttttcagaactcattacttgtaagttttattttagataaacttcttgttgttggcacttagtattgtgccagtaatgtgccataagaagagacaactttggttttagttctttggaagttgtcaataaacataaaacagtatttcaaggaggaaaaaacccatttcattgttttaggcttctctagattggaagaaaagatggtaatggtcccaaaacactggggggaaagggggaagaaggtgcgtggaatctgtgatttggccataactgctttattttgttttacctgttgttatcatttttagtttaagaaccttttagcttgtatcacttgcccttatctccagagtgatgtctcaatctttttagtctgtcatatgcaattttccccccttaaactacaactgtttatttgaaaaattataaaagtacaggaaaggtgaaagaacaatatgatgaccactgtttagagtaatcagttagcattttgtcctatttgcttttctctttatatattccttttttttcccttttccccctgcagaaccattcaaaagtgaattgcagacatcatcacatcaataatactgaagcacttatcattttacatcaaggtcattcttctacataaccatatctttttttacactcaagaaattaacattgacatgtaccatattcacattttctcagtttttctaaaaatgtcctttataactctctttcaatgcaagagccaatcagagattactatggcatttgactctcttagctccttaatcttctttcatctaaaattattccccgccaccttctgtctttatgaaattggcatttttgaagcgttagatcagttttcttgtagaacgtcccacaatttggagatgtctaatgaacataatcatgaagaaacaaacatttttggcaagaatactacgtagatagctggttggtggcacaagcctatagtcccagttactccaaaagctccgaaggctgaggcaggaggtggagtccagcctgggcaacaaagtggtaaggtcctgtctctaaaaacacacacacacatacacgcgtgattacatagatgatgatgactttccattgcatcacatcaggagacacataatgtcatttttgtcccattattagtgttgctaaccacttgtttaagatgtcaagtctctccatcataaagttacctttaaatggtatagtacttgaagacagtgtaaatatcctattcctcaaaagccttttgccatggatgatccttgcctaaatcagttatattggtgtttgctaattagtgattttctaacaatgtatttattagtttatgtttttcgagcaacaagaactctagcacccccccctttagtttcacaataaactcatttttttgttgtttcaagttgagagtgatgtgatttcttcattccttttgatgttcaaattgttctaaatttggccaatgggagccccttcaagctggctcaagcatgcattctttttttttttttttgagacagagtttcttgttgcctaggctggagtgcggtggcacgatcttggctcactgcaacctccgcctcctgggttcgagtgactctcctgcctcagcctcccaagtagctgggattacaggcctctgccaccacgcccagctacttttttgtatttttagtagagacgaggtttcaccatgttggccaggctggtctcgatctcctgacctcaggtgatccacctgccttggcctcccaaagtgctgggattacaggcgtgagccaccgtgcctggcttgtgcattcttttttcattatttgatcgttaccttgctttctggcacaggatgttccaggcttgccctgtagtttgccttagtcctgaaattgactgtttcttccaagagccttataaaataagaaatgcttagaaaccaagatatggacacaagtagtgctgattgctgctggggtgttaattgcatcaagcagacagtactaaggaaatatattaaccttcaatataccagaaaaagcagtcatcaccatttaccatctaggtccagtggatcctgtttactgtttatatttttaagtaatttttgcaaataatttacaggtctaagaataagggttagtgaaaaacaattttattggaaagtttaatcagaatttaaacacagcagttctctttatattaagcaaatcttgatgcacaaagattataagagatttaagaatactgccacatgtcctcttagaacaatgagattatccaggttcttgcatcatgaagtctttcctgttgaatgactgactggatgggaatatcctatttcctttttgttcttacaagtatagtgttcactcacggattcttaatttttccttattctaatcagtcaactcttttttaacattcactaagttcagatgcatgtagttttcttcctccattggcatggtttcttctaggacttaaaacaatacaaagataaaccattacagaatgcctgctttaagaacctatttctggtgtcttcagggtttttttctcctagcctctgacctcaagaatttaaaaaacttacaggagtagaagaggaaatagagtttagagatcttttattctagcaatcttgttttattatggtaaactaaatatatttaataaaatctgccatttaacatttcttgtgtgtatacttttcagtgacattgattacattcactgttaggtaaccatcactattctttctaaaactttttcgtcaccccaaacagaaactctctacccattaagcaataacgctgtcattctcccctcccccaaaccccaagtcatttatgactatacattttgttgcttgtgttttttggtgtcatatctaagaatccattgccagatccaaggtcttgaagatttatacctatgtttccttctagggatttcatgattttagcgcttatatttaggtcattgatccgttttgagttaatttctgtatattcattgattgttgattttgagaaaattcatctaggatattttcatctgaaggctcataatctgagatttaatttatgctctcatttcaccatcacgagtgtctttctgcgctaaccaatgtggtagccattaaccacatgtggctattatacttaaattcaaaattcaaattaattaaaattaagtaaaataaaaattcagttttttggttacaatggccacatctcaagtgctcattagtcacatttggctattgactgttgtattggtctgtgctgatgaagattcccttcatcaaaaaaaaaatttattggacttcattggtcaagagtgctactagctctttatattcataatctgattcatttaataattgtgaagtatctttccatcacttttttcctctttccattataggcagaaagtaaaaacaatctgaattctcaactgtgtttattgaaagcgaaaagcagagtacaaagatggtgtctgttatcatttatactgtcttgaaagatgatgcaatatcctaggcaatgcagtagacaatggaaggatgatattttgctgttgattgcattatccttctgagtgattccataattcttccattttctcattttcttattagttttttttttttagagcgtagttaggaatagttgatcataaaataattactaaggtgatgatgaaatggcaagatgcaggaaaaacataatcactaggatcctgtagtgtatcttagacttacaaagccactgtattcatatggtaattgcagaataaaatgagttttttttttcttaataggaaaattttcttttgattccttggaaggcctctaagagaagataaaaggcatgaaatattaatccttgcaaatagttagaactactcaagaaagaaactaaaaaaataaaactgggttcaatggaccctgactgtataccctgatactttgaattcaaatccattaccacaaggttcttcttaaattttccccagtctatatttgaaactccccttctttcatagtgaaaaccttggttctcaacatctgcatttattcatttgctctatcctacaatatatacaaaatagcttcagaattactgcattaataccactgccaatggcaaacctgaagtaaagttcaaaatgtctttgcagtttcattggcttttgtgtaattaatgcttttggggtgtacagttagggtactgatcccaaaagtcacttgaattactttttttctgtgcagttataccttggatttttatttatattgaatcttagtatttgttttttatctttttcacttaattgcattttatgaatacatgaaaacatttgcatggttcaaaatcacaactaaatcaaaagttatccctactgaggtaattctgattcattcccattcctgctcttacttacccctacagataaacttttttttttttttttttttgagacagagtttcactcttgttgcccaggctggagtgcagtggcgcaatctcggctcactgcaacctccacatcccaggttcaagcaattctcctgcctcagcctcccaagtaactggaattacaggcgcccaccaccatgcccggctaatttaaaaaatatttttagtagaaatggagtttgaccatgttcgccagggtggtttcaaactcctgacctcaggtgatctgcccgcctcagcctcccaaagtgctaggattacaggtgtgaaccaccacagccggcctagataaccatttacattcacttttgacctgtccttcctctgtttcttcttcaaaaatacatgtgttcactttatctcccctccatactgctttcttatacaaaaggcagcttattttgccttttgttcatctcattaaatgataaacctgggaattactctggttcatagagatattcctcatcattttttttttatttttttggagatggagtctcgctctgttgctcaggctggagtgcagcggtgcattctcggctccgcctcccgggttcatgctattctcctgcctcagccaagctaattttttttttttttttaattttttagtagagacggggtttcactgtgttagccaggatggtctcgatctcctgacctcgtgatccgcctgcctcggcctcccaaagtgctgagattacaggcgtgagccaccgtgcccggcctccttatcatattttgtggttgcatagtgctttatgtctgtgtcatcagatattcagctgatatcttattgatgggcatttggtgttttttagtctcttgatagtatagataatgcctcagtaaatcactttatgcatatgttgtttctcatttgtgaagtaactttgggtaaagtcctagagttggattactgagtcaaagggtaaatttgtttagctttatccatatttataaccaccctctcaatgaactattatgtttaatttaatttataatgtgaaataaaaatacataagagaaatagaagaatattatatctgaaaactaggaattccttgaattggctgtttcctgtgatcttcattgccattttcccagttaccatttttttcttttctttttttttttctttcttcctgggttcaagtgattctcctgcctcagcctcccaagtagctgggattaacaggcacccaccaccgtgcccagctaatttttatatttttagttgagacaggatttcaccatgttgaccaggcaggtctcaaactcctgacctcaggtgatgtgccctccttggccccccaaagtgctgggattacaggcgtgagccaccgtgcctggcccagttatcatttcttacaaaagaggcagtaattcctggctggccttggtagttccactttgttcctcttctgtctatttcccagagtagtctttttttttttttattttttgagatggagtttcgctcttgttgcccaggctggagtgcaatggagtggtcttggctcattgcaacctccacatcctgggttcaagcgattctcctgcctcagcctcccatgttgctgggattacaggtgcccgccaccacacccagctaatttttgtatttttagtagagatgagcgccatgttggtcagtctggtctcaaactcctgacctcaggtgatccacctgtcttcggcctcccaaaattttacaggcatgagccacggcgcctggcccagagtagtcttttttttttttttttttttaagaaggtccaaatcaataggtcttttattgcatcattgaaatatcacaagtatgtcttaggagtcatctggcatcttctttctgtagctggataactcttagatctgattcatcaacctgctgaacagttcctttttcagagacatagataccatccaaaaatttcctgatatccttgtttttaactgttgtgggttgctgaatcaaagctgctgaatttgaaacaagctcagtgtcatttccttcaaggattaattcatctttctgggcttgaggtactgaacaggcaacacctggtctcatctgaaccctgcggatgtatttttcacccaagaaatttcggatttcaacaagagacccattctggataacgacgttgatgggggaagtgagcatacacagacctcatcttgtaatggaagcccagtgtaacacccttgatcatgttctgtacatgactacaaatagtccgaacggtagccagttcctttctgttacccgaccatttgtcaacccggagcctcttttttttctttccaaggagtctgagttctacgttgatgtgattgaagtccttccgcagggttcctctggggccctttatgataactgtgcgtcccttcagagtaacgttgacattttctggaatgtcaacagtctgattgctgagaatggtcttcattctcacagtaaacgcagcaaaaaaaagtggcccagagtagtctttttaagaatgcaaattggatgatgtcattttgtcattttcctgcttataattcttttggatttatcagcaggaaaaccgtaaaagaaatacaatttatgttttgaaattttaaaatggattccaagtttctgttgacatctgcaacttttcttctgttttcatgaatgtattaatcataaagtctattatattttataaatgcaatatgtcaatcaaatgaaggtctgcttttattccttccccttggtttctttatagccgcttttgtttttatagattgccttgtaccttgtaattttgaactggatgccagatattgtaacaaaaaattctagggattctggagggggttaagctttcttttagcagccagagtaatccttatggagtatgttgtctgtttcataaattatgtgattatttgtgtgtagctctgtttctctattctgttccattggattatttgcctgtaattgcaccagtatcacactcttactattttagctttataataggtcttgatatctagtagtaaaattcctctagcactttgttcttcaagattgtctttactattctgaccctttgcttttttgtatatattttaggatcacctttccaatactcaaaaaataacattactggggttttgcttggagtgcactggatctaaagatcggtttgaggagaattaagatgtttacaatattaagttttaaaatctatgaacatggtatatcaatttatttacttctataactttttagtattagcttttaaaagtatataaatcttcatgtgttagatttatttctagatactattttttgttgccttttgtaatttacttgctattcatttttttttttttttttgctggtaacatacttgatttttacatattgactttgttctaaaattttttgttgttgttaaaaaatagagatgagtttgctgtgttggccagactagtctccaactccaggcctcaagtgatccacccgcctctgcttcccaaagtgctgggaccacaacaagtgtgagccaccatgcctggcctaaatttatttgaattctaattacttgcctgtacattctgatagtatctgtgtagttacatacaggcatgttgtttgtaaatactgacagttttattcattccagttcttaagtttttttttatggttgtttgttttgttttgttttttgccctattgtatgggctagaacctttaatataatgtaaaataaaagttaggacattgggctttacataccaggagggcagttttaagtatttcaccatacagatgttcgtagttggctttttgtagctactcgttatgaaaataaggacattttctcctgttgctaattttatcattaatggatgctgaattttatcaaatgtattttctatgtttcttgagataacaatatggtaaattactttgattctttaaaaatattcaaatgccattgcattcctgcagcaaacccatttgtagaggatgtgtttaccttgttgtatattgctagattaaatttgataatattttattaaggtattttgttctgttacatgaggcaaaattctgtaattctttcttttcttttcttttttctttttttttgattaactctaccagggtgctgcggctcacacctgtaatcccagcactttgggaagctgaggtgggcggatcacgtgaggtcaggggtttgagatcagcctggccaacatggtgaaaccccatctctacaaaaaatacaaaaataagctgggtgtggtggcgggggcctgtaatcccagctactcggaaggttgaggcatgagaattgcttgaacccgggaggtggaggttgcagtgagttgagatcacgccactgcactccagcctgggcaagtgagactccgtctcaaaaaaaaaacaacaaaaaacattaacactaccttaaacctatgattttcttttcttgtaatgtcgacgtaaggatttggcttcagaattaggctggtctcatgaaacaactcccatttttgtatatcctataaaagtttatacactgttgttattggtttttgtgtgtgtgttttgtttttgtttttttgaaacagaatctcgctctcatccaggctggagtgcagtggccaatcctggctcattgcatcctggaactcccaggctcaggtgatcctctcgcctcagtctccccgagtagctggggctataggaatgcgccaccatgcctggctaatttttctgtattttttgtagagacagagtctcactatgttgcccaggctggtcttgaacttctgggatcaagctatccatctgccttggcttcccaaaatgatggactacaggctagtcagccactgtgcctggctcgtactgtttctaacttaaatgtttggaagagttcatcaacaaagccgtctgggcccaatatttttcttggacattttgtatggagattttaagatacgacctcaatttctttgaaagttcaaagactatccagattttctgtttctagttatatcattttagaaaatgtgattttcaaggaattgtcctttctaagttttcaagcttgttgtccctccgagttatcataatatcctgttatctttttattatcagtagatttggtggtgatgtcctctttttaattactgtaatttttaatttgtgggttttttcctcccttgatttctcttcttaagggtttatcaattttatattttatatttttgcctttgatttttttcctcttttctaagtctgctttctactttactgatttcttctctcttttttcctgtttaagattttcctttgcctgtaatttttctagcccttagagatgatggttgaggttactaatattaacctttccttattataagatatgcattttgagctttaaatttttctcttaatcattgccttaggtactgcacacattttgtatgtcattttccttatcagtcatttaaaaatagtttctaatttctattgtgatttgctcattgacccataaattggaaatacattccttttcaaacattattttctacttatttttctgtttctctagtgtggtcagagtacacattctgcataattgaaatttaagtcttgccttttgacctaatgttttctttttcttggtaaatttttcataatttacttggaaaaaaatgttaatcctgcagtttttgggttcagtatgtgtctgttagttcaggctgcttgaatatgttgttccagtattttatgtccttgttaatttttttgtctgctaattctatcatttattgagatatgtattaaaatagtcactaggattatagatttatttttctctctttttttaacctttgctttatatattttacagctatgttattcattgtatacaaatttaaaattgtaaaaacttcctggtcagttgaccttttcaccattctgagatatttttatctctagtaatgctacttgccttcaagtctcctttgttggatattagtattagtatggtcacaccagctaaatttgtttgttttgtctatctttaaaaaaaatcttcttaacttcagtcttttgggttcgaagtgtgtcttataaacagcatattgttgtggttttaatattcagtctagatatcttttccttttatttagagtattttaagccattatatgtagtaggattcctgatatatttaattttatcacctttctattagacgtacattgtatttattttttattcaaaaaattgtagtaaatataacaaaatttaccattttaataattttattttaagagactgtgtcttgctttgtcacccaggctggagtgcagtggtatggtcatagctcactgcaaccttgaactcctgagctcaagtgatcctgcctgagtctcctgagtagctgggactacaggtgcatgccattgggcctagctaattaaaaaaaaaaatttttttttttgtatagacagggactcactatgttgcccagggtggtctcgaactcctggcctcaagcggtcgtcctgccttggcctctcaaagtgctgggaaataggcatgagctaccatgaccagcccattttaatcatttttaagtatacagttcagtggcattgggtatattcacgttgttgatcaaccgtaattaccatccatctccaggcctttttttttttttttttttaaatcttgcaaaactgaaactctgttcattaaacaataactctctattcttccccttcctgatctggctgccagcattctattatactttttgtctctatgaatttgattactctaagtacctttaagtggaatcatagagtatttgtccttttgtgattgggttatttcacttaccataatgtctcaaggttcgtccacgttgtggcacatatcagaatttcttcctttttaaggctgaataatattccattgtattatagaatgtattatgcagtgtattatacgtttttgtttattttagcatccatggatacttgggttgcctctaccttatggtgattttgagtaatgctgctgtgaacatgggtgtttggtttaagtatctgcttttgattcttttttttttgtttttttttttttttgttgtttgttttgagatggagtttcactcttgttgcccaggctggagtgcaatggcacaatctcggctcactgcaacctctatctcctgggttcaagtgattctcctgcctcagcctcccaagtagctgagattacaggcatgcaccaccacccctggctaattttttgtgtttagtagagttggggtttcaccatgttggtcaggctggtctcgaactcctgacctcgggtgatccacccacctcggcctcccaaagtgctgggattacaggcgtgtgccactgcgcccggctgctttcgattcttctgggtatgctcagaggtggaatttctggatcatatggtaattctgtgtttaatttttaaggaactgccacactgctttctccggtgactgtaccattttacattcccggacaaattcacaagggttccagtccacatactgggcaacttttggcatttgcattggctgtttttgttttctgtaaggaccatcctcattactggagtgtcaaatggttccccattatagttctaattgatgtacttttatgttcttttttctctgctttttttttttccttcctttggatcaaacattttgtattgttatttcctcctattaacttgtttgtgatacattattttttactacttttatactgtacttatggtttagtactaaatataatatgtatttatagtatctttttttttttttttttttacaattccttttcactaagtaagtctctggtgtctctagagatcatagcattcattcatttatccagcccacctcttgcatgattgctcccatgcattttaattctacgtattttaaacaccacaacactgtatttaattgttctgtgtggtcaatattgatttatctttacccatctttttttttttttatcctgtacctttactcttcaattctttctgcatttatattactctgaagagtcctttttgttgttgttgctgtcttttttttaaccgatcacacttatttaataacaatatctagtttaataatttttttgataagacattttattaacaacatgtctagtttaataaaccgtatttcttttaatgaaagtctgctggtgcagaattctgtttctgttgaaaatgttattttttccttcatgttggaggatctatttgctgtgtatgtcactatagattttcagttattttttccagcatttcaagatactctgttatctttcactttctgtcattgatgttgaagttagctctagctctaagtcttgtcactcctttgaaggctgtgaatctcccctgtgcctcctccgcctacccccagctgcacataaagttttccctttttctttggttttcatcactgttaactatgttgtgccttgaaattttctttgtgcttctcttgcttgggattcttggagtttcttcagtctatcggctgatactttgatatcagttttagaaaatccagaattcaagatcttttcaatattgcttctgctgcattctctcttccctttctggatcttgcacttacactgtgtttcacatgtctcttattggtcttttctgtattttccatgttttatttttgaatctctgggctttaatttggtgttttcttttgacctgtcaagttcaaaaatcctgatttctgctgtttaatcttcttttaatgccatttattttaatttttggttcttcagttgtacaattttcattggtttcttcctgtagatttcagttctctagtgaaaattgctatttttaaaatatattccttttatcttttcctctatttccttgaacatattaatcattatgtttgttaacaccagtatctagattgcatgtgtgtttggttctgttttatatattttttcttttgacttttggtcatatgatcctgtttcttggcatcctagttatttttgactaaatcctgggattgtgtctttaaagattgtagatattcctgaaggtgataacttcctctggaaaaggcgcgtcctttcttctactgaagcagatgcagtgggagctggtcaccttactccgggcaggtgctgggtggagtgaaggccaggttgttgttttagtaagccatctgctgcttctggtttcttcaggctttcatctggaagcttgattttgctcactacaccatatttccttggaggcttctgaactaatttttgtttgatcctgagctctgcttttcagagttttagtttatctttttggccttcgcagctcagaatttgacagataccatgggagggaaagcagttgtatgcttaagacctctcttgtgctctcattttactaccatatagccttgtcagactgcgcaagttctgcttgtttctttctgctagccatggctgtctcctcagggcccaacataattctcagcctcttgcctgtgcctcctgttgtctgagaaaaaagtggcttcagatgatcagctcacttctccacagttctcccctctctgaatccttggtccctcttgtcctcactgctttggcagctcttgggtgcctttaaagagataatttttgtatttatctgtctgtctcttctactttctgagagttacaagctttttttgtcctacttggaggtattacgcaagtctagactgagttttgaatttacatagctacttgcagtgatttagtgtgatttgagatttttactacagtctcactgacagtggtggtttcttttgtttttgttttttgttttgtttttttttttttttttgagacggagttttgctctcgttgcccaggctggagtgcaatggcgtgaccttggctcactgcaacctctgctttccgggtttgattttcctgcctcagcctcctgagtagctgggattacaggcgcctgccacaacgcctggccaattttttgtatttttcgtagagatagggcttcaccatcttggccaggctgatctcaaactcctgatcttaggtgatccacctgtctcggcctcccaaagtgctgggattacaggtgtgagccaccacacccggccagtggtgtttaaaataaaaatgtacttctttaattaatgctaaataagattgctttaatttgacttttttgttacctgggagtatattttcctgtttttttttttttttcttctacttgtatttactcttcagtggactgtttgtttcctttgagcctttcacaggcacattctcctcctaacctgtgtggcaagtttgctactctaaagttttcttagttgcaaatcatacagatgcttaggaaattatgaaataatttactgtaagaagtcaggagggagtcaagggtaggagttttttgggtctctgtgttttgttttcttgtacatttatgttgtttcctgtaccagctgctttagatggttggttagcttgtgcagatcctatagtggtctttcttttaggaccagaatctgtaatcacctcaggctctgatgtccaaagtaaatgaggttggtccagttagcagcaggtatctatcctctccctttattgtggctacagacggagaaatgggattctttacccattctttatgggagaagggcagggtttctacgaggaaggcatgtgaatggagaagaaatgattgataatctctgataaaacagtgggcatgcaaggtggaattcaggcagtatttcagattcagaaatgtaggtcacaatttcttatctgcagttcggaagcctgaaaagcactgaaaacacagttattcttaagtttatggcatattcattgttgacaaaactggaacttatatgggtgaggcatttattacattttgaatattcatatgtttcattgcaaatgttatgtttactacatggccctacctcatggagctttcagccagaacagttagagttcctggatctctagttcaagtcacccccaaaaccctccaaacatgtaaacgtcttcattcttagaagtattactgaatgtatgtgtcaccactcttaaaatatttccaataggagaaaactgtaatagaatacttaagatagtgagtaatgattactgaaagaaaaaaagagcccagtttgtaggtaaagccaacaagggagggagatgtatagtgccagagcacgttagacatagtccgatatttgtgtaaaacgagactagattggcatacaggaaaaaatgcttagaagcctgtgtaggaggaatctggctaaaacataaaggtaaagattaaggagacttttgattccatcttagctaacattttaaataagaacatgtaagtgttttcagaagtggctccatataattggacttagctttcattagcagttttgctttgcagcatatttggaacataatttgtttaaaattgaaatggttttctttacttttatggtggttgatttatttatttatttatttatttttggggacagggtctctgtctgtctcccaggctggagtgcagtggtgtgatctcggctcactgcaacctccacctccttggttcaagcaattcaagctacctgagtagctggaattacaggcatgcaccaccacacctggctaatttttgtatttttggtagagacggggtttcaccatgttggctaggctggtctgaactcctggcatcatgtgatctactggcctgggcctcaaagtgctaagattacaggcgtgagccactctgctcaggctatggtggtttttatacagcaacactcagtttattacagtttatcccagtgcttattgcatttttttctgttaggaacctgtagtcaattcctcccttatttgcaaaggggtttacttaaaagatttgtaatttttgtaaattttgttgaaagtacactatttgtatactttggtaatgatatttatacatctacttgacaaatctatcttttaagaaattattttcagcttttaagtaactgtcacataacatgtatgtccagtatccattggcttcagctcccactgatactattttctttttgactcagcagctttaaaaccaaaatagtaagatctgtcttgaagccacagtctagcaggagaagcaaactatataaatttagacagctctgattagcacagttcccaaactgttatattatgcattaacccatacaggaagaatttaaaattgcagtatggtgagacaagttttagaagtgaagcatttttgagaaaagtatcaaagatgaagaagtactcttgaccttttaggctttctgttccagtctagttttagtgtggcattgtatttaacttgccttagaaactcataggtttatgccctcttgtggtctgtcaccaatataaatagcacaaatgaaaattttaagtactggagatcttactgcatgttactgctctcctttataaaataatttttaaaaagcagcttctgaggaacaacagctaagaaattattattcctgtcttccatataatgtgtggagcttaaaagttaccaaatgttattttaacccttggtaacaaaatgtatgtgtatgttaggtggacactaatgaacagaaaaatatttttggatgggctgtccatcattgtccttctaggtgtctaaccctattaatttataagtgtcttaaaaatatgatgaggtgtgatagtaattgtagggctagcacattacccttctaccttcacctaaacatacacagatatactagtaaatgatgcttgggaaatgtgtttatacttgtttcatctgaaagggtcaggagctgtaggaggcattggaagaaataaggattataatgttagtgaattggtgaacttaagcttacagaatttgcttttactgacatgattggcaaggtcttatttgtgagtgtgggactgaggaactaactagtggaggagaaacagcaatagcagtcagtgttttaagactgcagctgtaaccagtgtttttctgctgttatccagtaagccgcatgatggttggaagcaggccagtatagggactgtgcactttaggattagatagaatccctgatagaaagacttggttttaaaactggtctcatctcttaccagttcctggacagttgtgtaatattaagtaagttacttcatctctgaatacaggtttcctctccaaataaagatttaaaccgcctccattgaactctttgcagttcgttttgtcacatgcagtgttggcatatactcctgttgttattgctcataggttaaagacagttttgtgttgcaaagaatggataccatatgactttgtagccactgggttgttggtaaagactcctaaatagtggtaaatcagctcatagttctttttctttactgtggacttactgctgtacttctatgtaggtacatactttattataaattcttgagtgtaaacgaggtcattatgttaaagaatttactagttcaggtattttaaagttgaagcctagtaactatttttaagaaaaatgaaaataatacaataagttttttttctttaggggcactatttgcatgttttggcaggtttaaaaaataaacaaaaactagttttgttcttccattgtggtcttacttttgtggaggacaacaaagtaatgaaatgtttttgtttcttttgctgtgtttttcaagtgttgcttgtagaacaaggctcgctgccttatggttacttttaaaatttaatacttaaagtaattaatctgagtcccctttcaggagaaataagattatttagaataatttaacttaagggaaaaatatttgtttttataacaccttctaaaatttctaagttgtagaaatttactaattttttcttttttttttttttttttttttttgagatggagtctccttctgttgtccaggctggagtgcagtggcgcgatctcggctcactgcaagctctgcctcccaggttcatgccattctcctacctcagcctcccgagtagccaggactacaggcacctgccaccatgcccggccatttttttgtatttttagtagagatggggtttcactgtgttagccaggatggtctcgatctcctgacctcgtgatccacccacctcagcctcccaaagtgctgggattacaggcgtgagccaccgcgtctgaccaaaatttactaattttttcttttgaataacttgctgtgaaatagaagacaactaaaaaaaaaaccctctaaatataatagaactgcttgggcttaaatcttttctgcaagtaggtggaccataaatcatataaacaaagataacctagacatgccatcagaaggctagtctatatatttttatatctacctctttcatctttccccttatttctgatttcccaaatgtcacttctttagtttacatttggatagtgcttatttgaagtctctgatattctacacactatatgtaactaataaagactttaaaatgtaaggcagcattttggtagtgaaaatttctcttgtacattgtgaaatggattttgttgttcgtctatcttcctagggagactgtttaagggaagtaaaaggaacagggcaagaatggccggaacgaagtggagggtagactatggggagtgatggcaagaacacatgccattctaccagtgacttgtttcttaaacataaaaagcatatgtgccaaatttgcatatttactaattaaaaaggcttcctggaaacattaggtagactatcttctataacctttaacaccgtcactaatggatatagcttagaagatttcctcgaaggtcctttaaataatgtaaatgattatgaatgtgtaactagttaatatgcagctacgaaaggattatcatgtagaggttaatgaacattctgctcttatggtttgcagggctttgctttctgtgcttttggctctcttcatgcttggaaacacatgcattgggattggaaaacatcctgactgttcttgggtctcatcttttaatggggttgttaaataggaactttatgaaaaggatttcatgagcatttttttcctttttcaatttacatttaattctatttgtctattttgtaattactgccaaatcagaaacagtgaaatggattgatgtagttttagcttggctcttccagatgtaaagtcagtactctattatatattgccactgttattaagtgttgctatgtgattgatacttactgagagatcttcattctaaaatggactttttatgctgagttaatgtgtagtatggttgggtttctgattatagcatgtattttggtacagaatttctgtcttagtatttaaaatgtcccaaaagaggacatttatttcaggaattaaatgttacaatagaggaatttagtgacaggtctaaaaaaaatcgtgtgtattttttttttttttttttttttttttttgctgggacgggatggtgaaacattgagcatatacaagagacaatattggtatttagagcagtgaactagagcagcgttttgcaaaccagataatgctgctctctttttctcatggcctagtcttaagcattttggctttcatcccctagtttctctgtctctaaaatggtatatggtattctagactgctgtttaaaatttttattaataggtaatttaaaagtagataattagcaatccttgaaaacagtgttaattcttaaattgtcattcaaaaatagtgttatttttttaaattgcatttttctttattgtctagtcttcttattttctgagcattttgagaatctactgacatatctccaaggaaaacaaataacttttgtacttaaattcattgttttagtattataaacatagtttaaactggctgtgaagtgcttacagtcttgatcataattcactggggaacaaatgagctgttcagagcatctccttatcccaagtatttcttcttgaaaatgtagtagaaaaatatcactgaattcattttttaatgcgtcagaataaaaattacaggtgaaaatgtttggagatatactgacaaaataaaatattgtcactacagtcattttttttaactgacgaaacgtggatgttacattggtttcttgttatttataacatttatgtattctacaaaatatgtaatattgaaaacaggtctgtagattgtacaaaatactagttatcttatatcatatgtcacctaatagttatgaagcgggttttgtaccaaagtatgaatcagaaagctgtaatttgttctgcagttatcagcctgcattagagggttatgataaagtgtgctgcttaaaaactaacgttcacatctctgtgcatttgacaaataaaaatgtatactgagatgctattaaatctgtaaagccaatgttctagttttcagatacactgatttttgtagctctgtgcatagctctgttttttcatgagtagttatctgttttcatgacaggtggtcactaactgccaagagagaatccagcattggtgagtgaaagatggttttattacacttctgaaatactgatggggtaacctacttgtgttcaaataatgtgtttactgtttgcgtgtgtgtgtatgtatgactagtaattgaattcttctagtagtctccattttgaatgcctttaatactaatttatattgtctttgacccttttctgaattacacatttctgatttcctgacgttgtgttaccacttgtatttattctaagtgccttttcttttctaagaataatattaatatcattatgaattggagactgagacatttttgaatgtgacttagctctattttggggatatttcttacattttagtagaaaaataatgggaatcagttactttaaaataatgatggaaatagggcacagaaatgttttcccaaagtttgaaaaaaaaatctaattttctacttttcagagcttgttttattgactgtactttttttttttttaagagagagcatatctattttaatgtgctaatctatagttaataggaccatgtttggtaaataacacactttcctttggcttctgaggaaaatgctcgatttaatggtgaataaaatcttatattatgagttgtcatgaagtatagctgttgatcttacagatatcaaattacaatatatccatgctgtgcttacgaaggttttactgagagaacaacaggagctgtcttgattattgtctgcagggttattgcaaaaatcatggtaactgcccctttagtggtgagattaaaccttcggttatacaccatcaagcatataatattttaaatttattttaagaggctttttcttcatgcctgagagatctccaaggaaataatttatagttagtgtatatcaaatgttttttggtttaaatgcacataggctgcaggcagtggataagagtgaaaattggtgcaatctgtacacatcatcttattaaattttgactattggcttgcagaaaataatctaaaactaataatatccactttataagtaaaaattcaggacttcattaattttcaataaatgcatcgttgtagttgcttccactggtggtgtaagtgtgttagcatttccataatggaccattcgcctttcattatacattcagttcaggttaaaacttgaaatacaagtcgttggccaaagaattttttcccctgcacatttagtcagagtggcccattttacaaataatttccagaggaagtttattaacgtggacttctgtctattggttttggtaagaagttcaggaaattagaaaggtattcactggaaatagatgctagtttacataaatgggtgaatggtaacttgcttctggtttgttttataagattcttattagagttctttaaggataagggcacgttttcatccttttattcacagcccctactgctatgtttggcacaaaataggcacttgataaatgtttgagtaaatgaccaaatatgtggttattttctatataacattttagtttacaaatactctagtagtgcacaagtctagtgagcagtgacagaaatgtgacatttacttcatggcaggttcatgtgaccctcaatttcacttttcagttttgtaaaaccctctaaactgtagaagcttagcatatttgcctacacatatcttgaagtaatatagtactttatacatttaaaaaattatttttttccagttaaaatttgcattttcctctgaatcatttctggtttggttcaggaaacagacttttctctttgcttttaatgaagatctatacatggtatattgctcaaatctgaatggccagtaaattaatcaattcattatatcaaaaaattgaaaccaaagtgtcaccatttccctgaaagcaaggaaattgctgtttgggagagtcgtggaattcttgtgatatttttgcattctcttaattcctcaaacaatagttgagtttctaccatatgccagtattgtgctgctgtttggaattgaaagaccctgccatagaagaattcatagccagacatataacagggaaatcacgataattttgtgctatttgcggagatatgaagcaactacaggagttcagaggctggagccgttcttagggtgtctcacacactacttttaaaagcatgttgctttaattcctacttaacccttggtattagcctagtctaaaatataatttctgttaagcccctattctttatgagtacgcaccagtatagtaaagaagaacaaaatatatggtttgaaaaatgcattcttatgctggtgatgtttatgcttgtttgtataatttttaagggattctttaaggaacaagtatatgtattctaggctcagaaataatctaaattggtttttgtttaaaaaaaaatgtaggacagggagtaaaaatatttatagaaaaataggagtgaaaatggtctgggaccacaggatctacccaaaaaaatctttgagaaaattaatttaaatcctagaactttggtgaacgaagaaatttataatatttgtttagttaataacagataaaaaggaaagattcaagcctattggatgagaatttgtacattattttagagctaataataatggttttcagtttagtgaggatttaaaaaatgtttttgaatcaaactttttttctttataatcctttttaactaactcaggaaataaggtattatgaaatccacacactgttacctccttaaagtatgaggatacttcccactgtttggtccactagtggctgattattttgtttgtggattatttgtaattttctttttaattcttccttaaagagcatggcatttggagtcacagacctatatttgaatcctgtcatttactagcgttttgaccttgaacaattatgctcagagtctcagttttttcttgtaaagtgatgatgatactacttaactcacagggttgtagtgaagatcaaatgagatcatgtctgtagaacaccctgcccggcactcaataagtattaataggaacccatatacctcttttgaaaattttaattgtcagacaaataaaaaaaaaagccagtgctttgtaaatattcgtgaatatttagtgttcattctgtttttttgtcatgatggagagagagttgggtttctgtgaattactgttacagctttacattaatatttttaaatcactttttggtatgaagaatttcaaatgaaaggtgatagagtagtatagtgaatcctcatgtactcatcagtcggctttgataatcatcaactcatgattttctctaaactgttcatttcaacatcttatcttgccatctactcctacctccaatttttttttaacttttattttagatttgggaggtacatgtagaggtttgttgcaaaggtgcattgcatgatgctgagatttgaggtacaattgaacccatcacccagatagcatagtacccagtaggcagttattcagcccttgcccctgccctttctcaccgctcttgtattccccagtgtttatttgttcccatctttatgtccatgtgtccccagtggttagctcccacttataagtgagaatatacagtatttggttttctgtttctgcattagttcgcttaggatagtggcctcctgctgcatccatgttactgcaaatatttcttcttttttatgggtgtgtagtagtccatagtatatatgtatcacatttttgttatccagttcactgttgatgggcacttggattgattccatggctttgctattgtgatcattgtggtagtgaacatacaggtgcatgtatctttttggcagaatgctttttttttttgggtggtctgtattcagtaatggattgctgggttgaatggttgttcagtttagttctttcagaaatctccaaactgctgtccacagtggctggacattcccactaacagtgtaaaagcattccttttctttgcagtcctgccaacatctgttcttttttgactttttaataaaaactattttgcctatcccatctccagttttgaaatgaatctaagccgtatcattccatctggaaatatttcagtatatatctttaagagacaagaaagactatatattaactttttaagatttaaataaaaaatatttaatgagacaatacatttacatgtttcaaaatttaggaggtatgaaaggatgtaaatgatgtataggttcctcctaactttgtcccctaattctcagttctgtttactttttttttttttttttttttgagatggagtctcactctgtcatccaggctagagtgcaatggcatggtttcggctcactgcaacttctgcctcgcgggttcaagctattctcctgactcagcctccgaagtagctgagattacaggcgcgtgccgccatgcccagctaatttttttagtattttagtaaagacggggtttcaccgtgttgcccaggctggtctcgaactcctgagctcaggcaatgcaccctcctccgcctcctaaagtgctaggattacaggtgtgagccaccgcacccggcccctcagttctgttttctggaaacagcagttttttaccaatttctcataaatcttttcagaaatggtttgcataatgtaagtgtttgtgtatgtatgtgtgtgtgttgtgtgtgtgtattcatctacatgtttatatacggctcccatccttttggacaaaaatgaaatcagattgtacctgttcatttaatactatacctaccctgtatcattaactaacagttcctctttacctcattccatacattttgctgtatgtcagacatttaacttttaggattactaaatgagacctggaactatttttttttaaataaataattgctacatgactgagagtatagctctgaactcaaaatatatccttgctaagatgatatatctgttattttactgctccttagtaaaattactgcaaaacttagtggcttgaaacaaccaccatttacttgcacatgattcagtgggtgtgcatattaagctgggctcacctgtgtggttcttctgctagtcttgtgtgggctcactgctttggttgcagccagttggtggctgggtcagctttgttgtccagaatgacctcaccctcaagtctggtggttagtgctgttggttgagcctctgcctccatgtgctcttttgtccagcttactttctatgggcatctcagcagcaagaatggaagctgcaaggccacgttatgttggtcaaaggaagggccagcgcagattcacaaggtgggaagataacacccacctgttgagaggaggcgtgaaaaagaattaatggtcatttttaatgcactgcaatgactttattgaataggtcctacacacacaaaaaggaagtctccgtcctttatgttgactggtgagaatgaaatgaaatagtacatgtgatgcctggcagttcatctttatgttaggcattacttacaatcgtaaatcgtatgcatgtgagttgtaaaaaatttattgccttgcttcctttattttaaaaggatttttggtaaaggtatctttgaaattacatgaaacagacttaaatatagaagaagatactttgttcaggtgtttaattttggaaagaatactttaaatttagacataaaagttctaaaacactttggcatgtgagttttgagagagtctaaagcaaatactcaacatttttttatttttcaaaggaaactggacaaaaataattgttcagaggaaaagagtaactagcttccattagaatttatagttaaagtatatagtaggaaataaccaagaaagcatacctgtatagctaaaaatctcaggtgaagatttgattttctctctctcttttttttttttcctgttggagctactctttcctatcagtcgggatggagatacctgctttatgcacacattgtatatctgtctatatgtctcatgtttttgaggcattccttgtgcacagaagcactgaactatatcattgtaacaatgccatggtttacagtatatttcatatgaatacctgaaactgttttcttgagttgccttcacatgctatataaaatttattttattatgtataatatgtgaaatattgatctgcatacctttaaaacttgtaaaagccaatgacttttttctacagtgttaggtagatttgtaaactgtgtttttcagagtctgtattttactgactacaaagttttcagtcactgttttgtagagggccttctgtttgggctttttctttatgttattttttctttttttttttttttttccctcctcttgagcagagagcaactgccaaactttctggaaattttgcatgtttttgttgttggagtttctgtagttgtttatgaaagtcttagggataagggggaagaatcatatatgtcaaatcttgtcattaagtttctgcacagttttaaaaaatggtgtgagttagtacatgcgctagtgattaagtgagtttggaactcgtgtgtaatgtttcaaagcaaattaagaggcaaaaaaaaagattcaagttgaatgtttaaagaattttttttaaatctgagttaggtttttaaatgtttattctgaatataaaatgaatgcatgcttagttatggaaaagttgaaataagaaaggaataaagataaatttactcataattgtaaagagaagctaattctctccctgtttttaaaacattcccttttattccctctagcttcttaattctgtatgtgtatttatgtgactaaggtcaaactgtaaatgcatttttcttttccttctctttttaaagagttaaatgatttttaacttgtaattagaatttattacttgtaggagtcctcaagcttttatatcatgtttttggaagcaaccagctagtttaacgcacttctgaaaatgaaaggaaaacttacatgttataggagagtttttttcccctgaagagttttaaactattattaaaaaaaatccctaatcacatttcatcacctagaatagtccttgatgacgacgtgtttccagtgtcaatatggtttggttcagtttcccatgaccagctcaagtccagtatctgactgaggcaaagggcttagggcttactgctttgggcacacctcatgattttttatctttgtctcaactgtattaggtttgaaaactgtacttctttgtacttttttttcattttccatttttttttatgaagagtaacatccaataaaactcttaagcacagagtcctgtttgaggatgaagatgtgaatattgcaacaaccacagtgcttgtctgagaagtgcatcacttggtgataatcctgagtgcttgttcttattttgagaaatataagtccagattccactataccaaagacagattggggtgggtatcagtgtaagacctgagagaaatgtaggctgtgaaaaatggaggcatgcctataatttactttttactaattcatattgaactcatgatcaaattggtgagggttttcacatttttcttttatttttaagtcagttgataattttgaggtttttaaatatttggtaggttcaaaaccaggattgccatttttcactgttgtaaaacctcttgagaaactttaacccggaggtatctatgattgggcctctgctgaaactatatgtaaaatatgagttcttttctcagggaagagcctagagtttttctagtttctcatagggatcagtgacctaaaagggttttttaattgctactgtaattaagaaaacccacaaaattacttttttctaaaatatgctttagaaagaaaatatagaaagtgtaaagtagcaaaacctatgaattacggtaagatttaagtagaaatttgcacaaactttcaaagcttaagtcagctataaactcatcacaccttttctaaaaggtcctttcctttgatttgtaataggaatttatattagttatagaaaatttggaaaataaaaagaacaaaaattacatataaactcatcagtaaaaattaactaggcactttaggatatttctttcaaacgtagatgaatgtgtttttacataattttaaaggttttttgctttgaattcacatctcattttcttagagcaaaagattagtaatgagtgaagaaacaggcacctgtgataactgacaagtcttcaaacacatgtgtatggttgttgtagagagaacagtagaacagatttttctgtccaggcttactatatatatatatccattgcactgttttctcattgttgaaaagttaaattgaagaaatctagtagaatgttagctgcatctctctttagataattttgtttcattgacttgaaaaattatgtttttatatgcgggttaatcttggtatctatgtctaatagtaaagttttctgatggactcataaaatataaagaacatagattatttcatcagcatcttctgatgacataaattccttggtataatagagttataaaaaaggaatataccaccattctgcctgaattttgtggtacatttcagttacttatatcaattgaaattactgaatattttgccatgaccatttagaaaaaaagtgtaatgctattgatttaattcaagtacatttaaattttccatgaggagtgttccttttcccaccaaattgcataaagcataacagtatagatccctttttcaagaatttttaaataaaatgtaacttttatcaatttgtttagattgtttaaaaggatactttgaaaaaaatcattatttcttgctttagtaactggaggacatctctttatctatatagaatccatgcccaaacttaatattcctctattttcttgattttagaggtgaaaagccaggcatccttcaagctagtggatctttgacaaagatgcattgcaaaacaatcaacaaacaatcagaaaggcatgctatgtgtgagtgatgatccctgcagcatatgccataggcttgttgtagaggagctgctcagtaaatggtggattcaattgaaacaagtcttttttggatgcttaatgggaagttgtagggtgggtatgatggactaaaaattatttctaaagaaggttatatattgtatatattccagaatcttccgtttttatcgtttcttaaattaaaaaataaaaatttaactctgtcccaggttaactcagatgttaacacttatatagaaatttttttcctctttccccgttaggcatctcacagtattttctgcttgtctgtttaggatgttaggtagaggaaaagagagtgatagaagattttttttcttaaaaaaaaaaaaaaaaaaaaaaaaaaactgggccaggcatggtggctcacacctgtaatcccagcactctgggaggccgaagcgggtagatcacaaggtcagggttcgagaccagcctgaccaacatggtgaaaccccgtctctactaaaaatacaaaaattagccgggtgcggtggcgcgtgcctataatctcagctactcaggaggctgaggcaggagaatcgcttgaacctgggaggtggaggttgcagtgagccgagatcacgccacggcactccaggctgggtgaaagagtgagactccatctccaaaaaaaaaaaaaaaaaaaaaagttcaatgttagtatttgctgtctattttaacttcttactttaaagtaaaattagcaaagtcttattgtttcaacctgatttaaattttatctcccttttttattatttaaaggttggagtctttatcactggcctcaaaggatgtagactttttttttttaatagagatttttatttttgtcagtcacttttaagaggattaaaaatgttgatccctttcatatttcctcgtccctttaaaaatattctattatgacaaatttcaaacatatggaagagtgaatcttgatcacctatctgtctgtaccctaatccgttaatccatttttttctgatgaatttcaaattaagttgtggacatctgtgtatttcacccctaaatacttgagcatatccctcatttaacttgatttctctcttactttctacaattttatgcaaatgagctgtttcccataggttctgtcttgatcttaatcctttaagggtaagggctaacttgtggttgtgttaatggtcttcatcgctgctgcctattttttttttttaatttccttaaaacaaaaggtactctcaaaaggcatattgcacatgattagcaagattcagaaggaagtggttaaagtttcttacatgccttatacctatgcttttagttcttgttttgtataaggaatgttgcatgaggatattggaaaaaaatttaaaattaagagttgaaggcggaacctgatctataaggatccattatgttgaagccaaagaagcaggtctagctattctaagtaagtaggctggagaggtgtttcttaactctatctgggttttgttttccatttgaagaaaaattattttaagcaattaccatttttgattactgtaatgactcctgtgtccaaaaattaattacgtttctaattattaaaatagaaaaaaaaatctgttcaaattttgttataaataaagaccccagacttaacctcagtaatgcattagttcttagcataacttttgcattttctgttgcataggctttgtgatctttaacaggattatttaagcctgaaataatagagatactatttggagatcactgtttgactaagccctgaacatttccacgaatgtagcctttagagagagagggttcctcaagctgtagtttcttccagagacattgcttgactcctcctggcctcccttcataaaggatttctacatgggctgcattttaagtgatcttctacttttgtatttttagaaaataattcaaaatttataaatagcaactctaatcttaaactgctctccagtatgtccgcatttttattccagagagaattattaataagttgaaaactgattatatttgacttgaaatattgacattgatctctggtattgcctgtttttgaacgtactgttcttttaatgtacaaaatagatgttttttgtgaggaagttgtttttttttctcctaagcattgttaccaaaataagacttattgaatggtgactttaatactagcttcttaatattcatagaaatatttagatatctaggctggtgtatttagtccttgagcatttgcagaattacttatctgaaacataaataagctgttagtgttatgttattaatagtgagtgttgactgtctaggcactgtaccagtcagtcctatggagacattctcccattgattgctcacaccagtcctgtttccaaagcccctgaatggttacattcagctgtactgtctttcagcaagttatactatttgtatcaaattggttagtgaaatcttgtaggtaatagtctttcttgaaagttttggaattgatgttttttgatgcttcatgaaaaaaatgagttttgagttttggaaccaaaatagtagttgctccatgctgggcagtgtgttagaccttttatatttaattctgttgaacctgtgagataagtattagtccaattttgccattgaagttactaagactaaggtgaatttgtgtaaattgcatgtagagcttgggattcactctctggtctgacttcaaagccatgttctttctggtacatagccttgtgcatgaagtttttttgccattttatccatataaaaattttccaggaggaggatttttgccttaaacaaaagaataaaacatgtttcgtatttatttatagaaaaggattttttttggggaaagttataaagcagttgcacactagaaaatgagaaagctttcatgaaggaatgcaggtcagaagacctagctaggttaaactcattgcttacctcatcttgatagaggagatctggcttcttgctatgtggtttttccatcttccttctactttgtcttctgtaagagaaaaatactgataagtgacatttattataggttatgtaaaataatatatatgtgaaattccttaagatcttaagactgagctaatttttttttattaattatgctactgttgcttcagggaactaagcagtaagctgaaaccaattctgtgatgtttgtcatttatattatctggagagttgttacctacattgcagtttatcctgatttcaatttgacaatgtctacatgttcttttaaattacttgctgagttggtgaatttttgtttctgttatttttaaaaactgacaacatccttctgcttaaaaaaaattcagtgctgtagttttgcttgcagcctgtatcttagcagggaaccctttggaaacccagtctccagagaaagtttgacgggcatcttggcataggctgctgcctggtattactcaaaaagaagggctgttcatttccagcaggtgttaagagctgagtaaggcccatagcatggaaatacgatcatctctgcccctacagagttacatataccttttggttgtttgaaattacttatttggtagctctgtttgatgtaacaagaaacagactcctaggccaaattgaaacgccttttgtattatctctacttaatttcttctacccccagttgattctctcttaccttaatcacattattatgaataattgaagagctgatgatgcatttttcagcctaaggttttctgatgaggactaaagcatctgatcaaatttcatgttcatgatttcaacttcacagccagtatctattcactcaaaagctttattaaatctcttctttcggccgggtgtggtggctcatgcctgtaatcccagcactttgggaggctgcggtggggggatcgcttgaagccaggagttcgagaccagcctggccaacgtggcgaagaaacctaatctctatggaagatacaaaaattagctgggcgtggtgtcatgcgtctgtagtctcagctactcaggaggctaaggcaggggaatcacttgaacccaggaggtggaggttgcagtgagctgagattgtgccactgcactccagcctgggcaacagagagagactctgtcttaaaataaataaatctcttcttttttcatcttgagtcccttcttctctccaaatatcaggccctcttttactgtctcccttaattttcacattttatttggtccagatagtcttgtatcttaaaaaacagtaattctcaaaatttgagtattctgcttctaaatgccagagtccctgaagagtcttaattcttcaataaatgtatggtagaataatgccattgctaaactgtataaaaacaggattttaaaactaaaaataaaaccacattaatcttgaatttgctaaaattatgtttttgattagcttgttttatgatacctggcctactgggcctcccaaattgctgggattacaggcgtgagccaccacacacgactgaaagaagagatttaataaagcttttgagtgaggccaggtgcagtggctcacgcctgtaactctagcacttcaggaggctgaagtgggaggatcatgaggtcaggagttcaagaccagcctgaccaacatggtgaaacctcctctctactgaaaatacaaaaactagccttgcatggtggcgcacacttgtaatcccagctactcaggaggctgaggcaggagaattgcttgaacccgggaggtggagggtgcagtgagccgagatcacgccactgcactttagcctgggcgacggagcgacactctgtctcaaaaaaaaaaaaaaaaaaaaaaaaaaaaaaaaaaaaaaaaaaaaaaaaaaaaaaaaaagaaaaatcgttaataatgtgtgtatttggtgttttctgtcaacaggaagaaggtagataatgactataatgcccttcgagaaagactcagcaccttgcctgataaattgtcttataatataatggtatgtttggtgtgtttcttttaaagtaatagttgtttcttgtaaacatattaactatgtgtcggttcacagaatgtcaggctgatggactgtgtccaaggtaactatgtagcaaggaagatttgttttgttttactttataagaacacagtaattgtagtaattgttggtatttacctttttttttcagaatatatatggtgacacaaatgacataaatattagcacaaaattggacatatttcaaatggaaacttactatataaaaaatgtaattatgacagaaatatggtactaagtcgtttcttgttagccagagcaggaataggccataatgttttgtaattcacagaattaaaccttaggacattgatttttatataaaaacgtgctgctaatttttgttttaatgatcttcacatcgacatagtgatctgttcatgagccctggattagagcctttcattgcatgaatgttctttcttatgaagactttgttcttttatactagtccaagtattttgtatatatagctagatagatccattaaagctatttgtttactaattcctgctttgcaaaagtgtctactttattgaaaataatttttagttttctttatcaaaagtattttgcattgacaatgtttcactactagttgctttcacttagatttgcaagtgaatgaaaagtataaacatgccgagacagtactactttctttaagagctatatgtaaatatggtgtggatttattttcctgttttaacattgatttatgaacataaagcaattttctttagattttcctagtaaaattttaatatagtgttgaatttctgtgaagctggcattttatttttcccaatgtataaataaaaaaattcagttatgtaaggcttttaatgcgaagtgttttataaaatgtacttttcagtgttttatgttttttcccttttttctttttttttaaacaataggtaccatttggcccttttgccttcatgccaggaaaacttgtccatactaatgaagtcactgttttactgggggacaactggtttgcaaagtgctcagcaaagcaggctgtaggtttagttgagcaccggaaagaacgtaggtacccattttaaatgatgtttctttgttgtatatgtatccattcacagattgccaagctgaagggctgtttcttaccaaaagtaccttccgtgatctatgaatccaggctgtttgtgattctgttgaattgtaggtagtttgagtagaaccaacatttgagaatgagctggagaatggagcatccgggttggaaatgtcacctacattggcatgttttcagaagttacaaagtttcaaagtcattatgtgattttgtagttagaagttgggaagacataaaaattggagtcattttataccttataatttttttttagttgctattatagacttatttttgcacttaatactttagtacacagaaataatgtgttttctccttagtgaactaagagaaatacctgtttacataagtagacaattcttaaaaatgctttttggtttggaaaaaaaaccatattttcatttgatagaggagaccaggtgtgaaaaggtgctacctaaaacagcacccttatcctttttcagttgtttgagttctctgcatccctttattagggcagctcttgagttttgtttatccgtgctattatctgtaggtgtatagaagcctacatacacacacacaacacacactacacattttgcagttggatgagctagcttgggttctagcttagttatattttaaaattaggttcagtttataatctgttgttatttctgtaatacgtatttagattgagagtataatatccgccctacctgctttttaaccttttagttaaatgtgtatttgaaaataaatgatgggaagatccttttttataaataaggtcatactaaacagaaaacagctgagttttctaaagctgaacttgatttcacttatacatgaatgagtactagagaactcatttactcagtgaaattctgggaactatatttggagactctaattgcaaatcaactcctataagtttataattgatatatattttgatcttttgtgacactaatcagaatcttattgttaggcctgtatgtaatttctggcaatgataaatcttttggctttgctgcattatttttgtcatgtatattagcgaaagagaatgggcatacttttttcttaaagaccttactgaagacgaagcctctctttatatactgaagtagctctgatgttatgaaatgaatccatagcctgttgaagtttgttcacattgattttcatatttcagtgaaaaaaatctttataattagttataacttaaaatattaatgggaatacttatactacaatagaatagagctctagagtagagaaacatgtttttgtaaatcactttctagtagttaaatatggttttggaaagtgaccaaacatagatgacttttgggatcaatatttatctaaaataattttcaaagtacatatttcctgttacaataaattctgggccgggcgcaggggctcatgcctgtaatcccagcactttgggaggacaaggcaggtggatcacctgaggtcaggagtccgagaccagcccgaccaacgtggtaaaacctcgtctctactaaaaatacaaaaattagccgggcgtggtggtgtgtgcctgtagtcccagctacttgggaggctgagacaggagaatcacttgaacccaggaggtggaggttgcagtgagctgagattgtgccactgcactccagcctgggcaacaaagcgaaattttgtctcaaaaaaaaaaaaaaaattacgtaaagctcttttattcacatggttttataatttatacctgaagaaaatacttaggtatattgttgtacttcacatttattaagaaaaggtactttatttttcttaaggcagaggaaatataaccagttaaacacatagtcatctatgtcatggttgattggggtaattggggaaggtctgagttacaacacgggtcatgatttgtttagccagcaccacagtcaggacacggaataggatacaagatactgctctcaggactcagctcctatcaaaacctccctcacactgccccttggtggtcacaccctacggctgcctactgctgaaggattgacgacttcacgtctgtgtcttttgagattagcttcttcacttgctgtaacgcctcatccaggtggttctgtgtattcaaagttcatttcttttattgctgaggagtgttccgttacatgcatatctattaaatgcacgtacagcagtttttccattcaccttttgagggacatttgggtgcttccattttttggcggttaggaacagagctgctgtaagcctttgtgtacaggtttttgtgcgaacatacatttttattgctgttggtaaatacctacaagtgagattgttagatcatatgataaatgtatgttcaatttttaagagactaccaagctgttttccaaagtggctgtatgatttacatctctttcagcagtgtgtgatagtggtatctttgcgtctctaccagccctcaatattgtcagtttaagaagtgtagccatttgaataggtgtatagtgattttagtttgcatcattgcctaatgatgttgagcattgattcatgcacttattttatctttgtgtcctcttttacctgttgaactcttttgcccattttaaaatattgggttatatatgcttttttttttttattttttgagatggagtctcactctgtcgcctaggctggagtgcagtggggcgatcttggctcactgcaaccttagcctccgaggttcgagcaattctcctgcctcagcctcctgagtagctgggattacagacatgcgccaccatgcccggctaatttttttgtacttttagtagagatggggtttcaccatgttggtcaggctggtcttgaactcctgacctcaggtgatccacccgcctcagcctctgaaagtgctgcgattacaggcgtgtgccattgcacctggcctgggttatatattttctttctttttttttgagatggagtctcactctgtcgcccaggctggagtgcagtggcgcgatgtcagttcatcgcaacctccgcctcccgggttcaagtgattctcctgctcagcctcctgagtagctgagattacaggtgcgtaccaccacgcccggctaatttttgtatttttagtagagacagggtttcaccatgttggtcaggctggtcttgaactcctgacctcatgatctgtccgccttgtggtccacccaccttggcctcccaaagtgctgagattacaggtatgagccaccgcaccccgctgcattgtatattttcttactgtcgttttgagagtttttttttttttaatatattctggatttatgttaaataggtgatgtgcaaatattttctcccactttgcatcttgtcttttcattctcttaacagtgtctttccagagcaagtttttaattatgaagttcagcttttagctttttttaatggatcatatgtgtggtgtcatatctaagaacgctttacctaaccttagttgttgaagattttcttctgtgttttcttctgaaagttttatactttgatattttacaattagatctgtgattgattttaagttaatttttgtttgaggtgtggggtttaggtcacggttcatttttcttgcatatggatgtccagttgctccaatactatgttgaaaatactgttctgtctccattgaaatgactttgcacctttgtcaaaatgaattggcaacaagaccatcttagataccacactaggatggttataataaaaaagacagtaacacttgttggtgaggatgtgaaaaaattggaaccctcattcattgctggtgggactgtaaactggggaagccactttggagaacagtttggaatttttcagcaagttaaacattgtgttttactgtgatctagcagttccacacctagatagtattctacccaagggaaataaaaatgtatgtccacaaatacttgtacatgaatattaagagcagcactgcttatagtagccgaaacatggaaacaacctaaatgtctatcaactaataacaggtgaataagtgtcgtacatccatgcagtggaatgttgtttggcaataaaaagatgtgtaccttgaaaacattagaataaattaaagaaaccagtcacaaaagaccatatattgtatgattccatttacatgaaatattcagaaaaggtaaatttataaaagaaaggagagtagtggctgcttagggccaggaaggtgtgagagagaatggagagtgactgctaaagagtatggagatttttaggggcaatgaaaatacaaaaatacagattttggtaatggttgcacaaccctttgaatatacgaaaaccatcaaattgtacattttaaatgggtgaattgtatgttatgtgaattataacttaaattgttaaaaaacaaatgaatgagccattttgtgtaattgtgtttttggaccatctgttctgtttctttatctatgtgtctgtctctttgctgatgccactctgttttgattactgtagcattatagtgttccttacagtgttccttaaagttggtagtacgggtgctctaagtttattctttccaaattgttttggctgttctacctcctttgcctttccatatacattttagaaaccactcgcttatgtttacaaaaactcctagtgggattttgattggaatcgcactaaatcaacacattaatttggggagaattgacctcttaactattaaatcttccagtgtgtaaatacttacagcctgtaaatacagtgtatctctgtatttaggacttctttaatcagttttgtagtttttgagcatacaggtcatatgcgttttgttaggtttatatctaagtgtttcaccttttgtggagctgttgtaaatgatggcattttaaaatcttgtttttcaagtgttctagtatatagaaataactctttttaaaaaagaattaacattgtatcctccattcatgctgaccacatttgttctctgaacttttttggggtagattccatgggattttctatgtagacaatcatgccttttgtaaatagctcctatttttttttattcctttccaaggtgtatacacttcatttctttttcttgccttacttccttggctaggacttgcagtataatattgaataggagtggtaagagtaggtaggtgtctttgtcttgaaactgatcttctggggaaaaatttggcattttattgttaagtgtgtgttagctgtaggttttttaaaaaaattaatactccctataagtttagggaactttctacctggttctaatttgcggattttttaaatgaaaatatgttgaattttgtccagtgtattttctgcatctattgatatgatcttgtagtttttcttctgtatctgttaatgtggtggattatattgattgatttttcttccctggatgaaccgcatttgatcatggtgtattctttcatgtattactggatttgatacattgagctttttttgtttaatatttgcatggcgtatatttttccatttcttttacttttatgctaactatatcatatttaaagtgggtttcttttttttgttcttttgagacagagtcttgctctattgcccaggctggagtgcagtggcctgatcttgactcactgcaacctccacctcccaagttcaagtggttctcccgcctcagcctcccgagtagtggggattacaggcgagtgccaccatgcccagctaatctttgtattttttatagagatggggtttcaccatgttggctaggctgatctcgaacccttgacctcaagtgatctgcctaccttggcctcccaaagtgctaggtttacaggcgtgagccactgtgcctggcctaaagtgagtttcttataggcagcatggatctttcctttttaattgattctgataatttcagtcttttaattgatgtacttagaccatttacatttaatgtaatatgtttggattcaggtttggcattcccccgtttttgttcctcttgttaccctttcttgtcctcttttagattatttaatatttttagtatcttattactctgttgttgctgaaataggaacttcttaaagtatttttaatgttacaaattagggattaatgtatttcacgtgaacttaaaagttttactctaaatacttgctttgagatttgctgaattcttttttacgttagagagcaatttttggcttagaaaggagtacatcttcaatgagactaagtgaaaagaccaggatttaatcagaggtttctacagtatagacaagtttttggtaattttgtttctgcatgtctctgtaatctacttttgaacaccggtatatagaatgacttgaaattctagtatctaggcaccatgtcttagaatttttggctgtgacaacaggcatttggccacatttctagtcattagtccagtgattaatgttaaacagttttacttataggatgatcttaatagattttcctttcaaagataatatggggagaattattttaccgtgtgtcttttgttcagaattgtatctgacacatttattttatcttatttttacttttgtcttaaaaatgcatacttagtcttcatttttacaataaagttatttttattaaatggaagagtggacatgaagggataagagcatgaactaggggtaatggctataggcttagagaagagatcagaagcaggaagaatttctgagcctgataggacttggcaactgattgaatgtgaaggttgaggggaagcattggatgagtggtgacctagaggcaatgttgttgacataatcaagtaagtttgtagatcactgcacactactttccctctaccagagagtaaaatgcacataggcacgttacttagaagccctgtaatgaaaaatatccctttagtcttgtttaatgttgtggttcccaaacttacttgattttgagaaacttttaaaatgtaatgtctgttatcttacagagcattctaaagaaaatcttgatttaggaatacatttttaggcagatttcagaagaaagtgggtgataagacgttagcaccgaatacagcttttttttttaagtgataggagaagaaagattgtatgaggtgcatcaggtcattcacaagatgggcttttttaaaaattatttttttagtaggttatatatggacatgatacaaaatctaaaggatatttattaaaaaacaactatgcttccttttcttgttctttaacatccagtttacctccctggaggcatcgctgttatcagtatcttactcattattccagggatattctgtgcatttacagccatagacttatgcattcctaccccaccctatacacctccactcaaattgtaggcacacttttatttttttgttttggcagcttgctgtcttattcttttcatggctatatagtattatattgtactctatttagccagtcctttactgataggcctttagatcgtcttcctttttttttgctgttaaaatcaatgctgcagtgaataacctctgtgtgtatgtgtgtgtgtgtgtgtgtgtatcatttgtacttgtgtgtatctgtagtataaatgacttaagatacaattgctggcatgaagtgaagtagatttttaactttgacagtgctggctttaacagactgactacacctttgccaacccaatgtgtttgcaaacttgttttgaaactgataccttattgtaggccccctggcactgctaactagctaacttactgtcttttcctccttttcctcccctcccctcccttcccttcccctcattcacatggttggtcagctataaccaccatccatctccagatatttttcatcttctcaaattaaaactgtaccagttaggtgataactccccattttttccttcctccccccatcccctggtaaccactattctactttccatatgaatttggctattctagataccttacataagtggaatcctacagcatttgtccttttgtgtctggattatttcacatagcataatgttttctaggttcatctgtgttgtagcacgtgtcagaatttccttttttttaaggatgaacaatattttattttgtgaataatgtgaattattctgttcgctattgtgaatagtgctgctatgaatataggtatacaaatatttatttagttccctgctttaaattatttggggtgtatatctgaaagtggaattgctggatcatatggaaattctgtggatttttttttttttttttgaggcagggtctcactctgttgcccaggctgggagtgcagtggtgcaatcttggctcactgcagcctccgcctcccaggttcaagagccttcctgcctcagcctcctgagtagctgggactacaggtgtgcaccaccatgcccgactaattttttgtatttttagtagagacagggtttcaccatgttggccaggctgatcttgaactcctgacctcaggtgatgcatctgcctcagtctcccaaagtgctgggattacaggtgtgagccaccacgcccggccctatgttgtattttttaaggaacctccattctgtctttcacagcagctgtaccattttatattctcaacaccaaaatacaaggaatccagttttcccacattcttgtcaacacttgttactatattttttatatataaaataaatatattttgaagtggcatatcatcaaggaatatagtttgaagtggatttgaagtgaagtatcagcagggttttgatttgtatttcttcagtgattaattatgttgagcatcttttcatgtgtttattggccacatgtatatcatctttggagaaatgtctattcaagtcttttgcccattttttatttgggttgtttgtttttcttgttcagttgtagttctttatatattctggatattagtcccttatcagaagtgtaatttgcaaatattttctcctggtctgttggttgcccttttactttcttcttttattttgtcttacttaaaaaaaaaaatagctgccaggtagagtgcccttttactttcttgataatgttgtttgatgcacaaaaatttttaattttcactgtccagttagtgtttttttgtttttgcctatgcttttcatgtcatatctaagaaattgttgccaaatgtcatgaagcagcttccctgtgtttttttttttgagtttcctagatttagctttcatttaggttgctgtatccattttatatatgcttgtaaggtaagggtccaactttattcttttgcatgtggttccagttttctcaacacgatttgctgaaaacactgtccttacctttttgaatggtttttacactcttgtcaaaaatcatttggtcatacatttatgaggtcttatgtctgagctttgtattctattttttggtccgtaagtctgtatttatgttggtaccacattattttgatgagggtagctttatagtaagttttgaaaacagaaagatgagacttacaacttagtttttctttttaaatattgttttggttattggggaacccttgagactccatgtgaattttagaatgggcttttctgtttttgcaaaaaaaaaattactggattttactgggagttgcactgagtctgttggttgccatgggtagtattgacatcctaattattaaatatattcactccgtgaacataggatatctatttatttgtgtcttatttgttttagcaacactttatagtttttagtgtgcaagtcttgcaccttcttaagagtttagtccttttggttctagtttaaatgaattgcttacaaatttcctttttagattgctcattgttagtgcatagaaatgcagttgatttttgtgtgttgattttgcatcctgcaactttgctgaattttttttattagctttacaagggtgttttgtgtgtgtgtgtgtgtgtgtattctttagggttttctgcatattacatataagattgtatcatatgttggtagtagagagaacttgacttctttccaatttggaggctttttatttgtttttcttgcttaattgctctagctagaacttctagtatgttgttgaatagacatgttcatagtgagcatccttgtcttattcccaatcttaggggagagactcgcagtctttcatcatagagtgtgatgtcagtgtggggttttcatatatggcctttattatgttatggaagttcccttctgtttctaatttattgagtttttttttttaatcatgaaaggttgttggattttgtcaaaggcttttttggattcaatcgagattaccatgttttttcctcttcattctgctaatgtagtatattacattgatttttatatgttgaacccatccttgcattccagggtgtggcagagatcattcttggtcatgatgtatcattcttttaatgtgctaccgtatttagtttgccagcattttgttgaggatttttatatgtatattcataagagaaattagcctgtagttttcatatttttatctggctggctcacagaatgtgttccctcccttttcattgtttagaagagtttgagaggattggtgttaattctttgaatgtttggtagaattcatctgtgaaagcatctcttcttggtcctttctttgttgggaggtttttgattactgattcaatatgctacttgttacaagtctattcagatttcagttttggtagtttgtgtttttctaggaatttgtctattttatctaaattatcaaacttgttggcagtcagttgtttgtactatttctgtataatcccattaatttctgtaatagtttttattgttccacttttgtttgtgattttagtgatttgaatcttctctttttttcttagacagtctaataaagatttgtcaattttgttgatcttgtaaaaaaccaacttttggttgcattaatttttcagcattttataaaaattctgttttgtttatcattctctaatctttgttattcctttcttctgttagctttgggttcagtttactctttcttttttttccagtttcttaaagtgtacagtgaagttactgatttgaagtatttctttttttttgatgtaggtatttacagctataaatatctttcttagcattgctttgctgcatcccataaattttcgttgagttttcatttttgttggtctcagggtattttctcttttcttttgagacagagtctcactcactctgttgccctggctggagtgcagtggtgcaatatcggctcactgtaacttccatctcccgcgttgaagggattcttctgcctcagcctccctagtagttgggactacaggtgagggctaccatgcctggctaatttttgtatttttagtagagtcggggtttcaccatgttgtccaggctagtcttgaattcctggcctcaagcaatctgcctgcctcggcctcctaaagtgctgggagccactgtgcccagccatattttttaattatgcctatgatttcttctttgacccattgacagattattttgtaaaattttcatatatttatgactttttccaattttccttctattaatgatttttaatgttattgagcattccagttagaaaagatactttatatgatttcaatcttgttaaatttttcgagacttattttgtggcctctcatatgacctatcctggtgactgttccatgtttcccttagaaggtgtgtatttttcctgttgttgggtggaggtttctatatatgtctattaggtctaattggtctttagtggtgttcatgttctttatttccttctggctgttctgtcctttattgaaaaggggatattcatgtctcctccagctattatggtgaaataatttctcccttctgttctgtacatttttgctttgtacatttgagctctgttaggtatgtatgtatttataattgttgtatcttgatagattgaaccttttatcagtgtgaaatatcctttgtctcttgtgacttttttaatttaaagtctattttgtctgatactactatagctacttcatttcttttttggttactattggtatggaatatctttttcattccttcactttcaacctatttgtgcccttagatctacaagtgagtctcttatagacagtatatagttggatcctttttttaaaacaattgattctgccaatttatgctttttgattgggaagtttaatctgtttacatgtatagtaattactgatgggggaaagactttcgctgttttgttattttctgcatgttttatagcttttttttgactcatttctatattactgccttcctttgtgtttgatttttttttatggtgaatggttttgatctccttttcacttctttttaaaatataggtattttctttgtggttaccatggcgattacatagaacatcctaaggttataaaatgtattttgaatttataccaacttaacttcaatcacatacagaggctttattcctgttcagctccttcacctctttatattatttgtgtcacaaattatatctttatatattgtgtctccattaatatagatgtccagtgatgtgtattcatttttctttatcacatagaaaagaaaaaagtggagttacaaaccaaaatgacagtaatacttatttttgcctatgtgtttacctttatcagagatctgtgttttcatatagctttgagttactgtcttttcatttctacccgaagaacttcctttagcatttcttggattgcaggtctagtggtgaggaatgccctcaactcttgtttatctgggaatatcttaaatttcccctcatttttaaaagactgttgttttgctaaacatagaattcttggatgaagtattttgtttctctctcagcactttttaaatatatgtcatcccataaccttctgtgcttcagggtttctgctgagaaatctgataatcttgttgaagatttcttgtttgtgatgagtggtttttctcttgatgctttcaagattctctctttgttgttgttcaacagtttgattatagtgtgtcttggtgtgggtctgggtttatcctacttggatttcgttgagcttcttggatttgtagattcgtaccttatcaagcaatgtgtatgctcttgagtatctccaataaggcatttcaaaatacaaatttatgattttagtttatgatagatgtatatagctttaaataaccacaaaccatcttaagacgttatttaaaaaaaagagcagcattcacttatcccttttggctcacagttcccattcctcagatgtaattactttctgtttttggctatttttactctgctctttttattcatattttccagtggttggcatatcctgtttttgtttacttcttttttttttaattttatgtattattaactacctgtctataatttaagaggaccatgtagcatttttacatgtcctccctgtctctgcttctctaatctttttgctattgttgtatcacaatttttgttgaatcagtattcatgcttagatattatgtaattccattttgttcttgtacaggcttttagttgaatttaactgctttttttgttgcatagttttctatgtgtctgtcattaattcagtcagatactttttttgttgttaaaaattttactgctggagtctttcattgtcttgcttcaatttggactggcttctctcctgatcaaaggagagccgtcttcctggtgtcttcttaccctgtttttgccttttatttatttcctgttttctgtttcccaaagcacccttttttcaggttctatttagtttgttggaatattgctttaagtaacttttgggaacctgctcggaggtacttctttgaatttttatgtatctgaataactcttatattccttatactcctgcttcttattgttaagtagactgtttagaattctaggtcttaagtaactgttgccctcagaattttggatacattattctgttacctcctgtctttaagtgttgctattgaaaatcttgatgctattttcgttttctttgtatataacttgtttttttgtttttaaagctttgagattcctttttggtccttattccccatgatctggaatacaacagtggtacaccttgaagccgtgctatggatcctttaaaatttgtttgctagtgcttagtaggccttttttgagtggaggcttaagtcctccagccgtgggaaatttatattagtaatttgaaaatttccttttcttgttgcctatttgtttgtccttgttgtaatttttgaagtgatttcttctgcatactcttttaaatcatgtattgactttaaaattttcctgtacatagtttcatttctggaagcactttttttttgttctttggctgtttctttgttacagcatcctgttcttgtttcatggatggagggtctttttttaaggagtatttgttttttcttttaaagttttcatctttaaacatttcctccatgtttcttttttcttctccctcttttctctcttgctctctttttttggtctctagcattaatgttcaagaatttcttcaaatgtctggtgatccttggctaaccatttatacttgcgttgagtactgtcaggaagctctgtgtgcataggcaaggtttgttgactgataggtattttttgtagggatttaaggtagcaagctgatttatttattttttttaaattgagcaatctttaagtatcagcagattctacaaaagagtcttctgatcttcttcatctagtgttctgagaaccaggctgggcgtttcaaggttcagtatgttcacttggaattaatcctcctggtttcactaagacattttctattctctttccacttccctattccctaccatctctacaaaccactctaagctgtgaatcttttgtttaagcaagaaaggagaaacctttcttgtgagattagggtttggggacctgttcttttcaaacttttatctagatctttggttaaagttcactcttcttttggaaatactctcaagtgaattgccttttccaggtccgatatcccagatcgacttgtagtagcttttcccagccacagttaggttccatttttttctgttgtgcaaagtccattatcagttgtgcagtttccaaaatttggttgacatttcttgtctattttctcttcaaatgtatttgtctttatgggtttatgcctttaaaaatttcttagttgttactttacctaaggtataggggaaaggcaaatactaagtacatgtattcaatgtgctattttaaagcagaagtccaaacctttgtactggtttaagaaggagtacatcctgtccagaggtttgtgagtatttccaccagggggcacgtcctgttgaagctgtcgaaagaatatttaaaaattccagcacacaaaagaaacgaggttgagaatagagtggtcacaaaggattcagtagagaattgcatatttacaggcttcatactattcagtacatatgaatatatggctaagtaaaaaagactcctttcacgaatgatgttcataacttttattagtgttttgcaaataatttttattacatctgcatttctgttcctttcaaatatatacaattctacaaactgttaactaaatgtttctaaatatttggtcttacttagtgagtaggcatatcgtttatctttaggtgaaaatgactgcttaagttcttatgaggttttaaattttcttttttggtttaaacatgtctttggaatttgcactgttaatttgctttaagtctcctttttcatagctaactcaaaggatttcagccagttctggacaaagattctgaattagtgaagactttaaaatattagcttatgcttgctgcacatttaacctgcagcctggttttgtcagctaaataaataaaaactatacctcattctatacttctgaaatcctagaaaatttaacttctgatttttagttaaaataacctgtgtttgaaaacaatcttctgtccttcaaattactaatttttttcttcaattttagtttttattttttggggtggggggaagtatctgtggagaactgtcttttgtacattttcacagctatttctttgatcccattgaatttgttttcttttttctataataattggtaactaaaatgtttgagattaaaatgaatacagatattgtctatatcacaaagtatatttctttttctctcagtagtgttatttgctataatttcagtgtggtttgaaattttgcttaattagatttcaacttagccatgtttggagcgttaaaattgattgagtctgtttaaatgatccatttttagtgacatgtatatttcacctcttaaaataaatttttggagaatagagtacaaaagctttagtgaaaaatgtaatagcatggtttctaatgttaaatctcagagttatagaaagaaatggaattaaattctcattctgcttttttaactgttgttcttttgaaacaacctgtagatacgaatttagacttgttatttactttgtacaaaatcgaaataggtgcttaccattctgctgtattttatgttattgtgagcaccaggttcgtttgccttgcggttgcccagctttcttttgtcttgtcttaaattttctgtatagctatctaattttttgttgctctaggacataggacttatgataatttaatagagatatatatctgcatatataatgtgtatgtgacggtgttggtgcttatcagtttgtggtatttctgagattctgatataaagtatatgcttttgagatctgatttcttaaccttgtgatagtggtttatattaatgtatgattcagaaagctttcttgaatttaaaaatggaactgtgcaatcgtatttcagtttttcataattaccctatttccaaaacactttgtttcttaaatggaatattcacacaactttttcttacatgcgtgagttatgatgaattttttttaaagtcaacaatagttgattgaaagtaactcctataacatcagtgaacaatcaattctttacacattgacaacccaaggctttcactgatacctttagcttagttgcacagtatttatatgtggatagacttttaaaaatgtacttagcttacctacctgccatttttaatattttccagtcttcttgaaaaaagttattgatttgacctcctacctaaaataatgttctttagatctaaagctggttagacacattatctgactgagtttactgaagcaaaaacattccataaccttaaccttttccctgaccccctgcttttaacaactgccgacatagttttatgctgttatgtgaccatgctcggatgaaatctgtcaaacagctccttgagttattaggctgtctgagtctgacctttctgcaatcaaagatatatgacttaagggctcagatttgccatggcaaccggtccaatttgctgccgtgagaaaaggtctaattgttgcagaaatttaatgatctagagcgacatcagggctgtgagattttatgaactgtttacaccgtaattttcattttgttaatgcagtcttttttttgtaacccattcatggctagagcataagtgattgtgttttatttaaaatagcattgcatagcatgagagccgtatcggagaacatgtgccactctcgagaagcccttcatatgtggtgatatttcacttttaactcccttccttattttcattcttttaaaagatattttaactgcttagacctttgccagacctgcattcatcattggtagagaaagaactatgtacttttctcctccatcctcttctgatctgcttactgattgagtgcctgttgtaaaacagtaggaaatcacagagcatctgggggaggaggtatcatatcactgtctattattctttatcagcgcttggccataaaaattctgtatttggagaaaagtaggatattgttcagcatataattatagttagaaaccccatgtattttttagatggtgccatttactgcttagcagagatttctactctgattacagaaacatgaattacttgttgcatttgtccagtattgggtagagaaatgtttgtgtctattctcaaattaaaatttttcctcaaataggttaatagagggtggtatttaggagatgttgaaaggctgtgtgttgtgttgttatgcagtttaacttggaaatggttgattatataccgtaaaaaatgtgttgtattttcagtcatctaatttaggaatattttctgttcaggaacagaataacttgtcttaatctatgttatctatgcattatccagctggacaaaaattacctgtgcaacaaaactgttatgaaatactgcattttatgtgatgatccaactagatatttatcctatagaaacctggtagcaccaggcagcatctacaatctagttctgtactctgtaatagagagaaaatatgttagacattttattacgaacaaagtaatgtgctatatatatagcacaaaaatacacagtataacttattaaaagtccatttaaaaggaaaatagtgtaagatttttgaaaagcattactgttaaatcatacttgtagtgtgataggactacagttaaaatattcctacaggtcgtatatatgccatgctttacataatggttgtgttcattgtttcagatgtaagaaaaacaatagatgacttaaaaaaagtgatgaaaaattttgaatccagagttgaattcacagaagatttgcagaaaatgagcgatgtgagtatttgtttttagtcttctatatttttagaaaatattttcaaagaaatatgaagctatcttacagccaaggaacaaattaattgaagtttaaaatgctttcagacatcttaggttgaatagttgctctttggataattttagtatgctggagatttgtgttgttaatacgctttttttttgtttaaaaaccaggctgcaggtgatattgttgacatacgagaagaaattaaatgtgacttcgaatttaaaggtaagcagtaagattgttttatgtgtagctgtttagatattttgatttttgttgattttcagtgggctttctgtgagatatttgggatttagaatacacttttaaattcataggatgccaacatttttctactcattgatttttttttatgtgaaacattaatggataaataacttttggttaaaaatgtgattcctgactggtctgttttagtggtgggattacatggcttttttctcccaaagttctccagtgctccaaacctctaaaactcagaagatgtatattctagacatggatctgctcctaatttgttctctgaccatggtgaagtcctaagatatcttttgctagtttttcttcttttaaaactgcagctttgtaagctgtttttggaagaatgaatgaatgtgggtgtatttcagccattcctcttatggtgcctgcagtggctttccctgcgcaggttgttcccatctccacccagtagatttcttttgccaaggctggcttatgtgtttgggtttacttctgtaaagccaatggttccttcgtcagttgtaaagtgttaacggtagtgaaattgtaaaaagtattacagatggcttattatttgctactgtagaagactgtacagtgtcttaaacaaatgtactgagcattcgttttgactttcagcactcatattttggtgatgaactcttaagataacttactggttgaaagaagccacatcacaagtaacaggaagtggctttagaaggtgaaataaaggatatgtatattaaagttgaacagaaagacaagatttttgtttgtggtgaccagtgacaaattatgagcgctacaggtctgaaataaaaattgttaactactgtcttatcaataatagttacagagaataaggctgtgaaacataatttgatattttcagatgtatgcaacaatgcagcaaatttgaatatatgatggactcgaggtcatctggtagtgccatatctcataacaggacgcatcttagacttcttcccattactttcccattactttgctttaataaagcaaataaagccttaatttgctttattaaaaaataatctattttttaaaatgaaaagcagatacctctgagttcagatttgacccatcttttttcctcacatgaagattacaaatgaagcagtttaaaaagtagagatgttcatatgtaaaatgataatagaactttacagagatgagccgccgttgtttccttgtagggtactcattccttggcagtgccctggagtttaaagtatcctgtcacaaggcttttgcacgttactgtagtaactagatttccttgagtaaggatggtaaatggaaatttatcatttatgtgttgcatttcgccttataaccagggtgcattgtggccatttcttatgcatttttgaagctcttctcacaaccttgaatgtgtatgcaggttctctggggctcttgttgaaatacagattctgattcagtgggtctagggtgtccttagagcttacacttctgaagtgttccccaaggacgccagtgctgttgatccatggaccacactttgagtagcaaggctgtaagagacattcatccttggagttctgtttggcttaaaaattgtgacccctctgtttcaatatttcccttgccccaaaagaaagtctcattaagtctgggtttgtgccttttttatgttggctattaacagccacgtcttttcctttttctaaatagcaaaacaccgaattgctcataaaccgcattccaaaccaaaaacttcagatatttttgaagcagatattgcaaatgatgtgaaatccaaggatttgctagctgataaagaactgtgggctcgacttgaagaactagagagacaggaagaattgctgggtgaacttgataggtacttgatgacaaattatctttccaagataatttgtttctatacacatttcctcattaatctttttcttcattaataaaataatatgtgttcattgaagaaaatgcagggaagcataatatattatcaataatcctttcacctcaagatgaacattaattctctggaatattttcttataggattgtgtgtttgtgcatattcccatgcatgtacatgtacttaaatacttaagatcaacatcttcattttttattatggcctattttatataattaattataccagatagttgacttttaataatcatggatttaatatatataatgttaaattttaaatgaagtatttttatgccacacccaggatagtgctctatctttgaatgtgttgtgaaaaacaaaaatacactttgaatttaaatttgatacagtaaaatgtttattcttgctttccttttataaactttggagcaggtaatttgtaatctggtcagatagctatatgtatgagaaactttacgaaattgctgtttgaaatacacattagcacacacttagaattgttaaaatgctaaatgaaatctgctactcgagaagttctatattattttgcttaaatgatgtaccatatgcaataattagtttctgtgaaaaatagggcaggaagcataaaagtttctttttcctagtgtttcacctataaattcttaggtctttttgattaactaatactattcattttttaaaaccagttttggatcttgtgatttttcttggtcatgattctctttctattttttgtatgatgttatttcagttctgttgcattttcaattttgttatttttgtaaggtcctcacatcttttatagaatcaagtatgataaatgttcactcatgcatatagatatattcgtgtgcatatgtataaatcctttatttttaaaaattacaataatacatgctcattgtaaaatattctgagtataggagtagaaaataagtgtgtattatgtggtttcaatttctggtctttagagataaatgttctctgaatttcttacaactttattattattgatactatatttatattgcatatggccaatatctttcttgcaaagataaaaaaattatcttctatattctacttatgtctgaataacctcaatatatagaagcagcataggaactgttttttgttaatttatttcaaaacatttttttgtttttgaacttagaattctagttttaaaaatactttattcaagatcttagtatttacccatggaaactaactggaaatttaaataatgtaaaattctagtatgtttgtttgatcttgttaattttcttccttgctagtaagcctgatactgtgattgcaaatggagaagatacgacatcttctgaagaggaaaaggaagatcgtaacacaaatgtgaatgcgatgcatcaagtaacagactctcatactccttgtcataaggatgttgcaagttcagaaccattcagtggtcaagtgaatagtcagttgaactgttcagtgaatggttccagttcttaccacagtgatgatgatgatgatgatgatgatgacgacgacgacgacaacattgacgacgatgatggtgataacgaccatgaggctttaggggttggagataattctataccaacaatatatttttcacatactgttgagcctaagagggtttgtatacttttaactttactaattttgcatataatttgaacattaagcattatgatattttttagaagagcaatattaacaatcattatcattgtggatagtgccagacaggaaaatcatcttttgcctcttgttctgaccaatttaagaagaaaaagggaaaaaaaatttagttagctggtattggtccattgttctctgaaacaatgcattgtttggggtctggaaggggatcagatttgagtggcaactactgtaacttcacctgtccttcattcagagagttttcttaagaatcctggagttaattatattgtggacattttggtgtgcttaggatgttgaaagtgactgcattagttaaatttttaattatgccaggttgttttctatggacataaaatgaatacttcataggcacaaagggaaaatgtaggaggaagtaaaaattagtttcttttctgacaaagtaaatataaacatctgtggataatcatgacttagaattttggcattttagagctgggggtgactggagattttctaatacagagttttaaagcttttctctagtatgaaaagccttttgttccctccatacttactgtagaatcccagtatttaaaatagatcaaagcagcttggctctgattgaaggaaggataggctgccttaagtccatctttgccctctctctgctccatgtactgctctaaggggacactgggaattcgtctaattcgtctttctcagggaaatttaaggcctagaagacatagatctggttggtaacaaaacaggaactctttcgcctctgagtgccctttctacacaatatcccgattgcctgtatcagttaagggtctgtggtatcattcttaagtgtgtgtgattattatttagtgaaatatgtttaaaacatatttgatatttcttagcttcctaaagttattcctgctcctatatgaagtgaaataattgtttgtgtttttatattctaatatgtcagactgaaggggtcttcccctgattcttcgggaaaagttgactgagatgattagccagaaaaaaaggtcgctttttaatcttttgccaggcttttacttttttcctgttttcatttagataaaacagaaagaacaaatattatttgcaggaacgttacaggtaatagtggtcattattgtggaaagtatgctctaagtgctgactagggatagaaaaataacatgttaaccccatgtgaaccctgaacaggcttggtttttatttttttactccttcaatttctaaaaattagagatgttttaaaaattctaaataggcattatttaatagtacttttatgacttaaaggttgtattcttactgaatttttgtttatactctttcttttgaaatacataattcaagccaaacacttatatcaaaggaatggggtgatgggaagtttataagaaatctagcatttagttcaaatgtattttgctttctctacaataataaagacactgaagactaggatttgttaataaagaagattttctttagatgtcatagatctatgagataaggactttttaaaaaattccatctgataatgcacatcatttcagcatcagaaaatttcagctgcctctcttactattatttttttagttatagagtttatttgttttggtttcactttgatttaatttgtcaaaagattcttaatttcttgctctgaaattttaggtccgaataaatactggaaagaataccactttaaaattcagtgaaaagaaagaagaagccaaacgtaaacgaaagaacagcactggcagtggccactctgcccaggagctgccgaccatcaggacgcctgcagacatttacaggtgggaggcgctcacagctgcagggcagtctgctgggcttgcctctctttctgccactgaacctttactggagaaagttgactgtaacacagaagaccctcactgaaaagtgaagtgttctgaggagttaacttaggatctgataggctgaccggctgtagcttcccagtccagagcagtgggaatggaggattttttttttttttcactttctcctcttcaccagtgcttttgaaacatttccaaatggtctagtcagaaaatcttgtatcttcagaaagcatttttgtttccagtgggctaggtccctacgtttctaccacagccgtaacatgcttggcatgcagtttaccttttcagagtagaaattatactgttgcaggttttttttttttttccttttttttggaattgtttgttgagaaaactatcacttgaaaatacctactgtttttatgacccttatttataaatcagtgaaaattgctaaatgtatacgtgggtctaaaactttatgtagaattttggcaaaccatgctattgccacctaggacatgcttaaaaataacatgctgtgtttttgttctcactcataggtgggaattgaacaatgagaacacttggacacagggtggggaacaccacacaccggggtctgtcatggggtggggggaggggggaaggatagcattaggagatacacctaatgtaaatgatgagttaatgggtgcagcacaccaacatggcacatgtatacatatgtaacaaacctgcacgttgtgcacatgtaccctagaacttaaagtataataaaataaataaataacatgctgtgttttattattaggccagagaaatagctttcaaaatagtatgaagataccatttgaggctataaaattattgtgattgtgactattttagatataagattgtaataaaaattttcagattaatttctagaatagattcaaggaaattttcaaaaagttgttctcagttttatgagttacgtatagtgaatgcatatgtgttttgaatatcacagagcctttgttgatgttgtgaatggagaatatgtccctcgcaaatccatcctgaagtctcgaagtagagagaatagtgtgtgtagcgacactagtgaaagcagtgctgctgaatttgatgataggcggggagttttgaggagtatcagctgcgaagaagccacttgcagtgacaccagtgagagcattttggaagaggaaccacaagaaaatcaaaagaaacttttgcccttatcagtaacacctgaggtgtgtgtgtgtatcttttaattctttatttcatatagtatctttgaccagttttagctatttaatctgaaaagtcataagattaaattaattctaggttttatactttcttggtactaattaataaaaaattaatagtcacaaacagtacaaatattgtgataatcaaatagtttattttttgataaacacattacttgtcttaacgttctatttcagcaaaatgggaaatttaaaatgtcttacttggcattatgtattacatttgtagctaggaaattatttcgcagtttattttaaataaattaccagtaggtcattttctgatagtgtaaggagcagattacattattctcttttaaataccttggctaagttaaagaaaaataatgcatgcatagcagataattacctaaagtctaatattttaccttgtaccagtgaaacttaactcttgggggattatggaattgttttataatctgatgaaagctgtagaccctgtccatagaaaaaatagtgcacactcaatacactttcacccaccacacttcttacagtttttggtggtggtgcaggggaggttaggaaatccccaaataaggatgtctgtgaaatataaggctattgatttcttcattcttgtgttttggtgcgtatttgaagttttcaatttaaaaagtatttaggaagattggggaacccatgcctggatcaaaccagtgtacacatttgtatatacaataagatacatgcatatatataaccttatctaaaaattccattgcttttactaaatggtattatactcagtgtattaaatggtaattggggatggagattggtagcatttagggacagtacatatgactagaatgttttcttcccctcttcttagtataatgatcttaggtgacctggaaagtatcttaccttatttgatagtcttccatactgttagaaaacaggtaatggatgttatcaggtaattgctgataaatgtttgaaaattagttttttgtaaggacttagtgtatcatggtacagctagagtgtggaacctattttttatttcacccttagtagctttgcattttgtatggaaatgtttaatagtagttgctatacattttttaacatcaaagaaatagttcatgattatggtaagtactttggaagatatccttttcagtatctttttaaatgctaaaatacctctttttcaaaggcattttaaatagaagaaggagaagaaggctctatgctcatcgtgataaagtggagtttttaggaaagtaagctttaagctgcttttaccagttgaactccaaaaataatgtaggagagagatggctttctttgtttttgtttcagtggtggggcaaggtagaagaaggtggctttttaaattatttaggtgttacgttgttttaactaattttgagcacttggtagacagaggagaacaaaatgtacattaaagttcacctgtcaaattttcatttgtagagggaaggatggaggttctaaataccagcaatcttaaaaaaaaaaaaaaaattaactccttgtgtcttacctatttttgtataaaacgacatgtacagatatttccagcaatttatgcacattctttaattctgttccagttgaacatatagttgaccagattaaatgcagcaaacatccaggtgaaattgagtcatttctttttttgtggaacttctgatttctgtcattgagttaattatattaaaattttgaaacctgtacttattcctactagtatcagcacttttatttttcaacttccactgatcttttaaaattgaggcaatatgcagtaaaatatttaaataattgcataaacaccaccaaagagatatcagttagaaatgtcagtactggtgaaactaagctattggctagcaggcagcaaggccatcataggatagctcattcatcaactgatgtacaaaagtcagagtttgacaccctaatagcatttttattttaatacattatttttcacagcatgggctggacatgaatggaatgtatgaaagtttgaagaccttttatttatccatttcttttttttcccagataaaatttacattttacattttgttttcttgcatgtatactgtaaaaattacttctgtttggtggtgaaattaaaacttaatggtgttggtttctctgaacaattagtattttggtgtagtagtgttgtctagccaaaaatctcgtgaatttacttttaatgaaaagaattgccaaatgagtgaatgggaagattttgtgggtgtcttatttgcattttattaccataacctgacttttgttttctaggctttttctggaactgttatagaaaaagaatttgtatcaccttccttaacaccacccccagccattgctcatcccgcactacccactattccagaacgaaaggaagttctgttggaagcatctgaagaaactggaaagagggtttcaaagtttaaagctgccagattgcaacagaaagactaggccctgtctaggaaatgggaatttacatcctaaaacctagttgttcatttgtttagagtatctatagcaaaataggttacatgtagtttgaaataaggtatcctgagttactttggcaacaagttcttttacccttacccgtggtatttgaaaaaaatcaaggtaactgtctgaatactttaatatcagcttgttttgtgaattctctgaatactgtcaacactcttatctaagtttgcctttatgatgcagtggcagcattttgaattacttttcaaagaatactgttcatatgcattgtttttgtgtttcaaactaaatacaggcagttttgtgccagctgtgatattgtgcataccatatggaccattttaaagaaaattttaaaatttcaaatagattcaacaattacattacttgctttcacattttaaaggcactttaaaaaaatctacttctcttgtaggttttgcggctagttggctattcaagaaacctcgcccctctgaatgtcatactgtaatctttaaggaagaaagctacatgaattaattgtactctatgggaaaatttctttggaaagatattttgtaaaacttttttttccaagtaaaaactttatgaaacttggtctcaaaaatgttgtgaactttatgattcaaaattgagtacagatatgtccttgattcatatgtatgctacatgtatcacacaacagatctggaattctttcagttcctcagatacttctcccttagtttttgcagtttcactgggattatgttttgggaaacaaggaaaggtctagatgcttaaacattttaaataaaaattccttacagtttcatcttcccaacattttcattctttaaggctactttcctactaactgaaataacacatttacttttaccacaattcctcaaaataaatttattctaacattgaaaataacattacaagttaatcattagcttgatgcatgctaaaatgtagcttttaaaaagcattctgcattagtactaaaataagccatcaatgccagtccaccctctctattcatggctaaatatttaaaggttatttatagcttctttaatgaattcttcttaaacaaagtgaaattatgtcctagaaaagtagaagctattcgtaactagagcagtgcaactttaaagttttatgaatatgtattttaatgacaagggggcgagcttgcatccccactagttaatggataattcaaaccgaggactgattttgaaagatcacctaaaaatgtagatttgttctttagtaaatttagatcaactatgcatatattttgtaggtaaatctttcagtccatgccccaaccctcaccaaaaccaaagcagaaattacacacacaaagatgctcccgttaggaattgctattcacatgaggctttctgtgctagatttttttctcagaaacaaactttactgtaggactattgtggtgttcttaacagatttgtaatttcaagatgcgtgtcattaaataatttttcatgttcacagacttgattttgagcctgtctatgttacatctttcagataggttttccctcatagaacaagatggtagtagaagcagataaagtgtttgataacacatttttgcgtgttctgctctggagaccatgaaatagtgttgccccatttcatagcttcagtcttataacagagtattaaattgtaatttaaaattatagcttttttatattaaagtttgggacaaaatgaagctgtcttacctgttctgttttaaaccattataaaacagaacagcagaccaagagattctcttttaaactttctattttgaaatataataactttagtctttcagaaaattgcactaaatagtaccaagagttcccatataccctcatttcattcagcctccctcaatattgtaatatagaaccgtaatataattatccaaatcaggaaatttatgttggtgcaatagcgttagacctaaattacagatcttacttgaatttcaccaacttttccaccaaattttccattagaaaaagaactagtgttcttctgttcctcacatcttgtctatgaccctatcttgcatttatttgttacttactgctccttagtctttcctccaatctcagacagttcctcagtttgtctttcataactgatacttttgaagagtactggtgggatattttgaggatgttcctcagtttggatttatttgatgtactcagatgccttgaggttttgcaattttgaagagaataccacagaaaatgcatcatatcaagaggtgcattctagtgtgtcatttcaagttccttattttggtgtatcagtcttaatcacttggttaaggtggtgtctgccaggtatctccactgcaaaattactgtttccctttgtagttaatatcttgggagagatacatgagacatgaaaattcttttctcctccaacttatgctaagttttgcattcattagtggatcttgtctgtaacagttaccgctgtggtgtttgcctaaaggtgattttctgttttgctcttttgcacatttatttcttgaaattcttttataataacaagctttgcctccatacctctctctccaagtttatttgattatttatatctgtggacacctggatattttattatatgggttaaaattcattacttactatcattgttttgttgctcaaattcttctgcatttgcccattaggaactcctttgagttaactcctaggttctttaacaagttcccatatttttttgaacactttcttactggcaccacaaaatactacaggaccatctatttttcctctcccagccctggaaacaaccacttcaaggaaccctggttcctttaattggaaaatggtatttagaaaccaacatttgttcatttaagtatactaattgccaatagggtgtcattgcctcttgggcctttcaggagatacagctgggaaatatatgtatgtgtattaatgaatatacatttatgtgtctgcttattaaaaactcatgagttttgtactgatacttctgattctaatttaacaccacaggattaatttctggttttccttatttgttattttttccaatatgggtaacctgcctcttgtctgcagtgtatttacttactgtttttttgttgttgtgtcagtgtaatatacatgtagtttcagaagagctaattcataccctaggagaaacacattaactacattgcactgttctgcaattctttttgggttttgcctcatatatcagtcaagaaacagtttttcaaagttactgacgttcttttctttcccaccctctctgatctgtggactgatttgtactcttggtcctttttttactgtttgagcgttctctccacagcctggttgattttaatggtttattttttcagtatgtgaaacgtggttttcagagtgtgagctttgtaaaaggatatacatggagaagtgttgttcgtacctcattcctaccaccccattcccgttcccagctgctttctctcactttcccacctgcccatagtaagtaagctctagtttcttgtttagcctttctatgtctcttttgcacaaatccccacctacctactataaagaaccaatatttttagcttctggtttaacttttctatattctatactcatagcaaatacatgtatattttctttttcctttttttcttttcttttttctttttttttttgagacagggttacttttgcccaggctcaagtgcagtggtgcaatctcggctcactgcaacctctgcctcctgcgttcaggtgattctcatgcctcaacctcctgagcagctgggactacaggtacgtgccaccatgcgcaggtaatttttttttttttgtatgttttggtagagacagggttttgcatcttggtcaggttggtctagaacgcctgacctcaagtgatctacctccctcagcctcccaaagtgctggaattacaggcgtgagccactgtgcccggccaattttcttacatgcatttatttcttacatgaagaaagacattgtccattgcactttaattttttcagttaatattatgcccttgcgatccctctgtatcagtttttctgccttctttttttttttttttaaacagctatagtactccgttgtatagatggtacataatttgttcagccgctttcctaggtatgggcgtttaggttgtttgtgatgtttggcaattacatataatgatgcaatgaataactttatatatgtatttttgtatcattagaggtatatcttcagggtagatttctaggagtaggactgttgggccatatgaacacttactttgatttctttaaaacatagtaaaatctgttttgaagtatatttgttttgttcccttattgaggacatagtggttttttttgtttgtttgtttgagacggagtctcgctctgtcgcccaggctggagcgcagtggcccgatctcgactcactgcaagctctgcctcctggttcacgccattctcctgcctcagcctcccgagtagctggcactataggcacctgctaccacgcccggctaattttttgtatttttagtagagacggggtttcactgtgttagccaggatggtcttgatctcctgacctcatgatccacccgcctcggcctcccaaagtgctgggtttacaggtgtgtgccaccacgcctggcccgaggacatagttttaacatatacgtatgtctgcatatcattgatgattttttagaatgattctggggcagtatggtatcttaaaggggtttcagaatcattaaaaacattgtgttacataatgattatgttcattttactaaaatgtgatttttttaaaattggtcatgcatatttaagagctttccattcattgaaataattcctaatttgtgaaatgcaggtgtctattttacagatttgtctcctccataagaaacaggttttcaagggtaaaactgatctttatctatctgttctttaggtggtggcatgtaggctgtcaagcaaaggcctattaagtgaattcctcagttaaaataaatatgatttatatatttaattggtcagtattaaatttttacattttaaaataatttaaatttcattttagaagaatatcatttaggattaaagaatgtttttgcagttcccttaaccaataagtcacaaagagttaaatattttttttagcacttactatgtgtcatgcatttttagcacacttggtgtggattatctcatttaattgctcacagcatcccagtgaggtaggcactattgttttatccttcaccctcatcctaagacagagactaacattttaagccacacaactgttaagtaggttacactcaggcagctttgctccagaaccagcactcgtaacacatttttttgacttttttttttttttaacattgccatctaaacaagacactcagctagtgaggaaatatgtgatctatatgatgtctccataatttcacctacttacaatgaggccaccttttaaaaaatctgaatttttgaagcctgttttgtttgttaaactttctacataagaaaattaatgttgacttggtggaatagggtggagtttttcaatgatgttatttggccatatacacaaaaggaatatgataggtggagaatagtaaaattaagaagtaatcagtgtaacagtatttctctgaaaagctgctcatttttttatgtgaatttaggcattgtgtgcatgtgagtttaaaattagtgtgttcctcatcaagtgacctcatagtgaccgtttttatccctaatcatgttttttcctttagagagtaatagagctagatattttcctaatataacaggttccatcttttgtgtgtgagacagctttctgttttgtttttgtttatatgcatacatgcacctaatacaattatgctattattagcgtaaacagttgtttcagtacctttagtgatgtttggttacatggatgaattgtgcagtgatgaagttggagattttactgcatctgttacccgagtagtgtacgttgtacccaatatgtagttttttatccctcaccccacacccggcctcccccttctgggtctccagtgtccattatattactctactctgtatgccttttcgtacccatagcttagctcccacttataagtgagaacaggtggtatttggttttccacccctgagttacttcactggaggatagtggcctgcagttccatccaagttgctgcaaaagacatcatttcattcacttttatggctgagtagtatgccatggtgtatatgtaccacattttcgttatccacttattgactgacagacacttaggttggttccatatctttgcagctgtgaattgtgctgcaataaatgtgcagttgtcttttcgatacagtgacttcttttcctttgggtagatagtagtgggattgctggatcaaacggtagatctacttgtagttctttgagaaatctccatagtgttttccacagaggttgtactaatttacattcccaccagcagtgtataagtgttcccttttcatcacatccatgcattatctattgctttttgactttttagtaataaccattgtagctggggtaaggtggtatctcattgtggctttaatttgcatttccctaatgaatattttttcatgtttggccatttgtttatcttctttagagaaatgtctgtcatttgcccactttttaatgggattttttttcttgttgatttgtttgagttccttgtagattctggatattagtcctttgtcagatacatggtttgcaaatattttctcccgttttgtgggttgtctgtttactctgatgatgatttctttgactgtgcggatgcttcttaatctaattaggttattttttaaaatttattttattttattttttatttttttttgtgacggagtcttgctctgtcacctagactggagggagtaatctcggctcactgcaacctccacctcccaggttcacgtaattctcctgcctcagcctcccaagtagctgggattacaggcgtgtgcaaccacacctggctaatttttgtattcttaataatagagatggggtttcaccatgttggccagcctggtctcaaactcctgatctcacgtgatttacaaagttgtaaaaaaccctagctgaaataaaataaactacaagggtggctttaatacttctgaagacacaatagcactcgccttggcctcccaaagtgcagggattacaggcatgagccactgtgcccagccctaattaggttctatttattcatttttgtttttgttgcatttacttttggggtcttagtcataaattgtttgcctaggccaatgtctgggaaagtttttctaggttttcttctagaatttttatggtttcaggatttatatttgtttttaatccatcttcaattgatttgtgtatatcgtgagagatgaggatccagtttcattcttctacatgtggctatccagttttcccagcaccatttattgcatttattgactagggtgtccttttccccagttgatgtttttgtatgctttgttgaagatcagctggttctaagtatttgactttattcctgggttctctattctgttccattgttctatgtatctatttttataccagtgccatgctgttttggttactatagccttgtattataatttgaaggcaggtaatgtgatgcctccagatttattatttttgcttaggattactttggttatttgggctcttttttggttccatatgaacttcagaatttttttctaattttgtgaaaaatattgttagtattttgataggaattgtattacgtctgtgaattgctttgagcagtatgatatcgattcttccaatctgtgagtatgggatatatttccatttgtgtcatctgtgacgatttctttcagcagtgtttagtagcccaccttgttgtgatctttcacctccttggttaagtatattcctaagtattttattttattcttgtttttagcagttgtaaaagggattggattttttatttgattcacagcttggatgttggtgtacagcattgctactgatttgtgtagatttattatgtaacctgagactttactgaatttatttatcaaatttagaagtgttttggaggagtctttagggtcttccaggtgtaagattgtatcaatggtgaacagagataatttgacttcctcttttccaatttggataccctttatttctttctcttgcctgattgctctggctaggacttcctgaaaacagtttttaacctactctgacagtgtcttaaaactgtcaagtatagtctgtattttattgtaattactcttactgggaggactttactaatttgctttgggcattttatttaccctgcttgttgattgcctttccttttcttttttttttttttttaactgttgctcagacttaagtacttccctcttcctctactgatggggaagttacatatttgctatattttaatgttttggcacttgaaaagtatgtactattatcactttattgtagcgtttatagtacttggtttcatttgtgtctaacagctttattgaggtataatttacattctgtaacatccactttacagtatgcactttggggttttttagtagattttgagttgtgccatgttgaccacaactcagttgtagaacatttccattgttttaaaaacatcccttttgcctatttacagtaaattcctgttcctatccccaaccccgggacaccttaactaatatgctttctctatagagttctcttttctggacaattaatagaatcatacagtatgtagtgttttgcatttacctttcgatataaggtttttgaggttcatccattttttaaaaatcatgcatcagtaacttgttttttcttattgctgcatggtattacattgtatggatataccacattttgcttattcattcacaagttgatagaccctgaattgttcaggctataatcaataatgttgctatgaacattcatatatcagcccttgtgtgaatatgtgtttttatttatttagggtaaatacctaggagtggaattgttgggttggatggtgaattcaggtttaactttttaagaaattgcacagtttttcaaagaggctgtataattttatattcccatcagcaatgtttgagatttccagtttctccacatctttggcagcactgttactattttgtcttttttattatagcctttatagtggctgtggaatataataattgtattaatttacatttctgtagcgactaatgatgttgaaggtcttttcatgtgcttttagttctatttacatcttcttggaagtatctattcaaatctttggctcagtctttaattggttgtcttactgagttataagaagttctttttaaaaatttatttattttaattagagacagggtcttgctctgtcacccagtagggtgcagcgtcatgatcatggctcactgcagccttgacctcctgggctcaagtgatcctcccacctcagcctcctgagaagctgggattacaggcacgtgccaccatgcccagctaatttttaaattttttgcagaggcagggtctcgctgtgttgcccaggctgatctagaactcctagcttcaagcagtgctcctgcatagacctcccaaagtgctgggattacaggtgtgtttaagagttctttatatagtctaaatacaagccctttgtcaaatatatgaattgcaaatattttctctaagtctgtggcttgtctttgattttttaaatgtcttttgaagcacaaaatctttagttttaatgaagtccaattgatatacctcaatatatattatacctccataaagctgttagatacaaatgaaaccaaagtactatagacacaaatgaaaccaaagtactataaacactacaataaagtgatcataatagtacatactttttaagtgccaaaacatttatatatatatatatatatatatatatatatatatatatatatatatatatatttgtggttagtgtttttggtatcttatctaagaattctttaatccagaataataaaacttttctcccatgttttcttctagaagttttatacttcagctcttaagagttagggctatgatctgttttgtgtgtggggtgagtccagggtctaaatctgactttttgcacggataattttaataccatttaatagttctagagctgttgaaaagactgtcctttttgcagtgaatgctttagcatctttttttgaaaatagttgactataagcataaggttgtttgtgtactgagtgcttgtctgtccttatatcacttccagtggtcttaattactgtggctttacttacaacaaactttcaaatatggaactgttaaacccttcaattttgttctttttcaaaatttttttggggtattctgagccctttccatatccacataaattttaaggtcagcttacccacttctgcaaaaatgccttttgggatttttacagggattgtgttaaatctgtagatgaatttggggagaattgccatgcttatattgagtctgcgaatctgtgaacatggaatgtttatttgtttatatcttgattagtttctctcagtgtgtataaaagattactttcaaaacattgttttcagtttacaaatctttcgttaaatttattcctaaatttttaattctttcaggtgcagttgtaaatggagttttttccttaatgtcatttttgaattgttcgttgataatatatgtataattaatttttgtatattggctttgtatcctgcaaccttcctgagctcatttattagttcttgtcaagggggtgtgtgtgagagggagagtgagtgagtgtatgtgtgtgattgtatattctttaatatttgctacgtataggattgtgtcatttgtgaatagagaatcttacttctttccaatcttgattccttgtctttttcttgcctgattatattggctagagtctctagtaaaccttgaatagaagtgggtgagaacacctatccttccttgttcccaatcttagggagaagatattcaacctttcatcagtaggtatgatgttggctataggttttctgtagctgccttttattagattgagaaaaattccttttattcgtaggtttgttggagttttctttcatgaatggagttgaatttttcagacgctttttatgcagcccttgttccttctttagtataatacattaattttctgattaaattttctgattaaattaattttctgattaaaccaatcctgcattcctgggataaagcccatttttaatgtgcgtgatcctttttatatgttactgaatttggtttgctgatgttttgttgagaatatttgtgtatatattcatgagggatattgatctgtcatgttctatttttgtgatgtctttgtttggtttttatataaggataatattgacctcacaaaatcagatgggaagtatactcttctggatgaatttgtgaaggactagtactatttcttctttaaatgtttgatagaattcatcagtgaaaccattgggcctgcagttttctttgtgtgaagatttgtaattgctattaaagttcttattttaagtctatttaagttttatatttcttcttgagtccatttgataatttgactctttgtaggaatttgtccatttcatgtaaattattgcatttgtcatcataaagttgtccaaagtattcctttataatccatttaatttcttaagttggcagcaatttcctttttattttactttttttgtagagacagggtctcactatgttgtccaggctggtttcaaactcctaggctcaagtgatcctcctgccttggcctcccaaagtgctggtattgcatgtgtgaggcaccgtgcctggcctgtgatttccttctgattttgctaatttttgtcctatattttttgtaattctaactataggtctgtcagttttattgaccttttcagagaaactttttgattttgttgattttcctctagttttctattccagtgacttttactttaatctttattatttcctttcttcttccttgccttttatagtttttaaaggtgttaatctattgatttgagactactgtcttctaatgtaggtgtttaaagatataaattgacctctaggcactaacccttagctgcatccagtgacatttgatttgttttaatttttctgtagttaaaaatattttctaatttctcttgagatgtcttttttgactcatgggttactgtaatatgtattgtttaatttccaaatattagtgggtttctcaagtttctttctgttggttcctgctttaattgtgttgtgtctggagaaaacatttattatgtctttagtttttaaaaattcattaggactttttaaaaatgggtagcatatgttctcctgtgtgtgcttcaaaagaatacgtattctgttgttttatggagtgttctgttgatgtcatgtcaaggtcattgttattgttgtcttctgtattcttgctgattttttgtctacttgtgctatccgttattgagagtgggatactgaggccttacactattattgttaaatagtcctacctttcaagttctgttagtttttgtttcatgcatttttttctctgttgttaggtacatatatgtttgtcattgtcatatcttctgattaattgaagcttttattattacaaaatgtcccttttttctctagtaacattttaattttaaagcctatgtcagttttgtctgatatgattatgaccactccaccttggttatggttatgcttatgtggtatctcttttttcatcctttttagcatttgtatcttgtgggcagcatgtggttgaattttgtttttaaaaagtctattttgccagcctgtctttttattgaaatgtgtgttaattcatgtaattgttgatatggctcatttacatatcaatagctcatgccattttgttagtcattttttatatgtcatgtcttttttgttcctctgttcctccttggttacctttttttgtgtatgttaaataaatcttttagtataaactttgaattcctttacaaaaagaaactgtactttttttttttttaaacccacaaatttatttcttacatttgtggaaactgggaagtcaaggttagcagctgatttggttcctgccgagggctctcttcctgggctgcagatggcctcctgtgtcctcacatagtagaagagagctttactcttttttatgagttattttatagtggttgctctagagtttataggatgcattgtaacattataacctgcgtcagaataatactaacttaattctggcagactttgcttcagcatagctctagtctctttttcctttgtcctattattgtaatatattttataacagtacaggtttattatttataactatatgggttcattatttttccatgcaattatcttttaagtaagagaagaaaacttaaaaagagtattttttctattttttacatttgcctacataattacttttactggtactttaattttttatgtggattcaagttaccatctggtggtgtttcctttcagcctgaagtacttgctttagcatatcttgtaaaaaaaattttggtggcaacaaattctctttgtctatctgggaagatctttatttttgtcctcttttttgaaggatagttttactggatttagaattcttgtttgacagtagagtatgttataccacttaattctggccttcattgtttcttttgagaagtcagctgctaattttactggggttcccctgtgcatgataagtccatttttctcttgctgctttcaagattttgatgtgtatcggtgtggatattttaatgtttattctacttggattttattgagatacttggatatacagatttatacttcttactaaatttggaatgttttcagacattaaaaacttctatgactcttcaaaagatgtcaaaacttgtatggccctcactattcttttcttctgggattcccattatgcatatgttggtattgattgtaacccacagatttcctacttggttcatttttcattctcacttctgttcttcagattgtgtaatttgtattgatttatctttgagttcactgattcttccttctgcattcaagtttgctgttgtccctctaatgaagctttcactttagttacttttcaactccagaatttccattttttaaaaaatgttgatctctttattaagtgttctctgattagtcattgttttcatgctttgattaaacacggttttcttttgttctttgaagatgtatttttattggctgctttgaagtctgtctgttaagtccaacatttgggaacccttggaaatagcttctgtttatactgagtatttttttttttatactagataagccatactttcctgtttaaaactggacattttaaataatacattgtaacagcatttatttctgatactctcctgccaggggttattgtccctttttttgtttgttttatgacttggccaagattaataatgagtttttctctacagcgtgtggcctctgatgtctctcctcagttatgtttgactacttatgggtcaccttggatcaatatatcttagtgatcagctggtgactggtcagagattgtacttaggcatcttgttttggtaagactttcatcctttgtcaaagtctctgttttgtttgaggaacacactgaaaatttatgcagtttacgagtcttccctgggggtatgtatatagttagagccttctctggtctctcagcatgttcataccctaatatgcccattacctttcaaaatgtaagcttatcaaggactatgattgtctcacttcctgattgtttctgttaaatctccaggcagaaaatttttttcttctgatctcttttttggcccagctatagtatttcagcttcaggtcatctatgatgtatgtggacctctcctatgtttggcactgaaattgctatatttaacaaagcccctgggcgttgggtttttccacgttgtttcagattgagtcagctccctacagtataaatgcttctggttttacaagctgtcccaccctgttagaactattgtctgaaggagctggggtgagggagagtggtcacaatgccacatactgtcatcatttttacccaactttcagtagttttcttgaataaacacttctccatttgtcctatgttttggtcaatactcagaggtgaaaagtagttgtttttgataattttgtctaatttttttaaaagtctgttttttaagagcaattttagattcacagcagtactgagcagaaggtacagagattttccatatatcccatgctcccacacctgcatagcctcccctatcatcaacatccccaccagagtgatacatttgttacaatagttgaatatccattgccacagtagttgaatatccattgccacatcatcacccgaagttgatagtttgtattagaattcactcttggtggacattcagttgctttggataaatatataagaacacatatccaccattatagttgctgagtagtctcactgccctaaaaatcctctgtgctgtgcctattcatccgtccctatgccccaatacctggtaatcactgatttttaaaattgtctccatagttttgctttctctgggatgtcatgtagtcggaatcacataatgtttagctttttaagattggcttcgttctcctttgagtttccataatgtcttttcatggtttgatagatctgaaaataatattccattgtcgggatgtaccgcagttcatccattcacctactgaaggacatcttggttgctttcaagttttggcaagtacaagtaaaactgctataaacatcagtgtgtggctttttgtgtggacatacgttttcagcttctttgggtaaataccaagtggtatgattgacagatcatatggtaagactatgttttgtaagaaactgccaaaccgtcttccaatctagctgtactattttgcattcccaccagcaatgaatgaaagttcctgttgctccacattctagccaatatttggtggtgtcactgttctggattttggctattctaataggtgtgtagtggtaactcattgtcattttaattagcatttacctgataaaacatgatatggatcatcttttcagatgcttatttgccatctgtgtgtcttctggtgaggtgtctgttaaggactttggccccttttttagtcaggttgttttcttattgtgttcaatttaatacttatttgtgtatttcagataacaatcctttgtcagaaatgccttttgcaaatattttctcccagtctgtggtttgtctttatattctcttgacagtgtctttcacacagcagaaattttaatgaagtccagcttatcagtttattctttcatgaatcatgcctttgctgtcatatctaaaaggccattgctaaatccaaagtcatctagatttttctcctatattctagagttttgtagttttgcattttatatttaggtctgtgaccagttttgagttagtttttgtgaagggtgtatggtctgtgtctagatttgttttgcatatgatgtcaggttgctccagcactatttgttgcagactttctgctccattccattgccgttcctcctttgccaaagatcagttgactgtatttatgtagctctgtttctgagctgtctgtttcatttcattgacctgtttctctcttatcaataccatactgtctcgattgctgtagctttgtagtaagtcttgaagtctgaaaatgtcagttaactttgttctcctcccatattgtgttgggtattctgggtcttttacctctccatgtaaactttagaatcagtttattggtatctacaaaataatttgctgggattatgaatgggattgcattgaatctatagatcaagttggaaagaactgatatcttgacagttgaatcttcctgtccatgaacatggagtacctctccattgatttagttctttgatttcatttgtcagagttttgtatataagtcttgtacataacttattagatttaaacctaagtatttcattttgagggtgctactgtagatggtattgtgtttataatttcaaattccacttgttcactgctggtgtatagggaagtgattgaccattgtaaccttgctataatcacttataagtttcaggaggttttcttttttggttgattctttccagttttctacaaagatgactgtcatctatgtacaaagacagtttggcttcctccttccaaatgtgtataccttttatctctttttctgtattatcaaggacttgcaatatgaagttgaaaaggagtggtgagaggggatatccttgccttgttcctgattagtgggaaggcttcaagtttctcaccattaagtatgatgttagcgtgggtttttgtagatttttaaaaattaaattgaggaacttcaccctattcctagtttactgtgagtttttattattagcaggtgttggattttgccaaatgctttttcttcatctattgatgtgatcatgtgatttttttcttctttaccttgttgatgtgatagattacattgattttcaaatgttgaaccacccttgcatacctagaataaatctcacttggtcatggtgtataatataatcctttgcatacatttttggattcagtttaataatattttcttgagttttgcatctgtgtttattagcaatatttgtctgtagtttcttgtaatgtctttgcctgattttcatatggtaatgctgaactcatagaagtagggagtactccctgtgcttctatcatctgaaagagataggagagaattggtgtattttttttttttccttaaatgtttcatagaattcataagtgtatctgtctgggcctgcgctttgtgttttggaaagttattaattatttaatagagatagtcttattccgattgtctgtttcttctcgtgtgagttttggtagattgtgctcttcaaggaattggtccattttttctaggagtaccatatttgtgtgcatagacgtgttcatagtatttcttggttatccttttaatctccctgggatctgtaatgacattctctttttttatttctgaaatcagcaatttgtgtcctctctcttttttcttagttagcttgtcttactgattttatttatctaagaaccagcttttggtttggttgattttctctactgattttatgttttcaatttcattgatttctgctttaaatttttattcttctccttactttggaattaatttcctctcctttttctattcttataaggtgaaggcttagatgattaattttagatctctcttttctgatatatgcattcagtgttaaaaattttcctttaagcactgttttcactgcatcccacaaattttgataagttgtattttttatttttgttcaaaatattttaaaatttcttttgagactttctttgatccatgtgttacttagaagtgtgttgtttaatctccaagtatttgggagattttccagctatatttgttattgatttctagtttaattcaattgtgatgtgagagcagacactgtataattgctattttaaatttgttaaggtgtgttttatgaccccaagtgtgatttgtcttggttaatgttccatattagcttggaaaaaattatgtattctgctgttattgaatgaagtagtctgtagataaccattatatcaagttagtaaatggtgttaatgagttcagctgtgtccttaactgatcttttgactgctggatctgcccatttctgatagatgggtactgaagtttctaggtataatagtgaattcatctgtttctccttccagttctgtcagttttttcttatgtagtttgatgctctgtttttagatgcatacacattaaggattgctatgtcttcttggaaaattgacccctatgtaactgtagaatgctccttttttttcctgataactttccttaatctgaagtctgctctatctgaagtgaatataatgactctcactttcttttgattaatgttagcatggtatatctttctccatccatttactttcaatttatatgtgtctttaaggtttttgtagacagtgtatagttgggtcttattttttggttcattctgacaatttatttgtcttttaattggtacttttaaaccattggcatttaaaatgattattgatatcgttggattgacatctaccatatttttactgtttttatatttgttgcccttgttctttttcctgtttttgtcttccactctttttctgctgtttgggtttttttgtttgtttcttttctcttatcgatcccttgcctgttaaataccccttttgattttaattgagcattttttatgattccgttttctctacttagcatatcagttatactttttaaaagcatctttttagtagttgccctggagttcggaacatctacagctaatccaagtccactttgaaatgatgatactataccatttcatgggtaatgcaaatgccttacaacaatccttattcctcctctctgctgttccttgtattgttgctgttatttatttgactaacacatcagtatacataaacatgtatatgtacataggtatacaaaatcaaatgcattgttggtactattatttggaacaaattgttatctgttaaataggtaagaataagaaactaagtttctgttttacgtttacctcttccttatgctctttatgaagatccgaatttctgaactatatgattttccttctatctaaagaactcctttaacacttctggagtgcagtgccatgatcatggctcatggcagtctgaattcctggacttcagcgatcctcccaccttggcctcccaaagtgctgggatttcgggtgtaagccactgcacctggcctctctcctttattttcgaaggctatttctcaggatatagaattctaggttgatagttcttttctcttggtgctttaaatatttcactccactcttcttacttgcatgctttctaagaagttgggtataattctttcttttgcttctctataggtaatgtgtttttttccctctggtttctttcaggatttttctttatgaattcttatagtttgaaaatgatgatgcctaggtggaatgtttatcctgcttagtgttctctgagcttcctggatctgtatttggtgtcttataataattttggggaaattcttagttgttactgtttctgatatttcttcggttcctttttttttttcttctactgattttcccattttgcatatgctaccccctttgtaggtgtcttgcagttcctggatattctgttctggagtttgcagccttttttttttttctctctctctgtttccttttcagtttggaggtttctgttgagatatcctcaagctcagagattcctagctttattcagtctgctaatgagcccatcaaagcattcttcatttctcctgcagtgtttttgatctctagcctttctttttggtactttttagaatttccatctctctgcttacattgcccacttgtgtttgcatccatctagtttattcattagagcctttagtatattaatcatagctgttttaaattcctggtctgatcatgtcaacatccttgctatatctgtcttgttctgatgcttgctctatctctcaaatgaccttttttgcctttcagtatgcctggtgatttttccttaacagctgggcacgttcctgagtaagaggaaaggctgtaaataggcccttagtaatgtggatttctttagagttctatagtcctgtgatcaggtcttagtctttgagtgagcctgtgcctctagactgtgtacatcacatgtgcttctcatttcccccatcagccttactgaagacacgatgactagagggagctggtgtttggtatttctcttctcccacatggaaggcaggagctgcctgaggttatttcccttcccctaggtcagtttggccctgataaaaccccagcagtttatcttccggttaaatagtttctcctgcgggcaaaccttgttaagaagaacagagtgttttggcatgtttttaaatggttccttttccttttcccctgctgcaaacacagggggatagttctcagatacttgctttgagaacctggtagagctcctggaggtaaaactcacaaaagtatgtgtgccggggaatgactgagtccccctggaattttcaactcaagacttgtccacactgtgcagttaagttaattacagttcaggtttccctagcctgtcagttttccctggaggcctctgtctgagggtctcggctccagttacttgtgcttctctgcctttgcctgccggtcactccaatttcaggggccatgatagtttgccctgtggcttcactgttcttaactaagaattgatttttcagtttgtttagctgtttacttattaggatgtagtgacaacgtccaagcttgtatgccaggccagaaactaatagtccaactttatctttgctttttagggaaagtatttacaaaggtcctcactttgtcattcctctcaattacctttgaaactttttctttaaatgttaaattgtctacctgtgaatttaccatgttgagtgctcttcattattttctgtacattgaagttgccacctggttttcttttcctccagcctgtagaacttgctttaatcacgttttaaatggtccttcccgtaatgtgaagggcgggtgagcaaggcgctcagagccgtcgtggggaggaccatgttgcttccaagcatcctgctcaccagtacaccaggggttggaaaaaccacactaggcaaaggacttgtgtcaaaatcaggactgaaatacattaatgtgggtgatttagctcaagaagtctgatcatcgtatatcatggagtctggcaagatggcttctcccaagagcatgccgaaagatgcacagatgatggcacaaatcctgaaggatctgggaattacagaatatgagccaagacttataaatcagatgttagagtttgccttccgttatgtgaccacaattctagatgatgcaaaaatttactccagccatgctaagaaagctaccgttgatgcagatgatgtgcagttggcaatccagttccacgctgaccagtcttttacctctcttcccccaagagatttttttattagatatcgcaaggcaaagaaatcaaaccccttttccattaatcaagccatattcaggtcctagattgccacctgatagatattgcttaacagctccaaattataggctgaaatctttacagaaaaaggcatcaacttccacgggaagagtaacagtcccgcagttaagtgttggttcagttgctagcagaccaagtactcccacactaggcacaccaaccccacagaccatgtctgtttcaactaaagtagggactcccgtgtccctcacagggcaaaggtttacagtacagatgcctacttcacagtctccagctgtaaaatcttcaattcctgcaacatcagcagttcagaatgttctgattaatccatcattaattgggtccaaaagcttcttattaccactaatacggtgttatcacaaaatactgccaatgaatcatcaaatgcattgaaaaagcgtgaagaagatgattatgataatttgtaatttagccttgctgcatgtaacatgtatacttggtcttgaattcattgtactgatactaaacatgcgtgctggatgttttcaagttgtattttagaaaactttcatatttaatgagtaaatacaattaccatacttttcaattgaaatgaaggtttttcatcagccttaaaagtgtaagaaaaatcaagttgtcattaatttgaaaaaaataatgttttaaatgttggtgtgctagatcaagttctttcaacttttctctgaaataatattattttgcctttatatttgaaagatatttttgctaggtatagaatcccaagttgacaggttattttcctccctccctccctccctccctcccttctcccctcccctccgctcactcgctcgctttcttgcttgcttgcttgcttgcttgcttgcttgcttttctttctttctttctttctttctttctttctgtctctctctctctttctttcttttgagacgaggtctcgctctgtcactcaagctggaatgcaacagcatggatcatagctcactgcaacccttgggctcaagcagtcttcctgcctcagtctcctgagtacctgggactacagacacatgtcaccaggtccagctaatttttaaatttcatgtagagacggggtctcacaatgttgtctaggctggtcttgaacacctgggctcaagtgttccatcctcctgccttggcctcccaaaatgctgggattataggcatgagccccaccatgcatgacctggttttcttctctagcactttgaagatgttttcccttgtcttttgcacttcgtggtgctgtgttatcttttattagtcttatttcagttccactgtaggtagtatgcattttcctctggcaatctaattatgatatgcataggtatattctttgtgtttggtcttgtcagggcctgttgagtatcttggatctgcagatttagagttttcatcaaatgtggaaatattttggccatattttttccaattttgcttgggccccaatctctttttctcctgtttctggaacaccaattacatttatattgtatagttttttttctttttttttttttgagagcgagtctcgttctgtcacccaggctggagtacagtggtgagatcttggcttactgcaacctctgcccccaggattctagcgattctcctgcctcagcctcccgagtagctgggattacagatgcctgccaccatgcctggctaatttttttgtacttttagtagagatggggttttgccatgttcgccaggctggtctcaaactcttgacctcaggtgatctgcctgccttggcctcccaaagtgctgggattacaggtgtgagccaccatccccagcctattatatagcttttattgttccataaggtcaccgaggcttggttcatttttgtgtagtcctttttctttctgtgtttaattatggttaatttttattgatatatcttcatgttcactaaatttttatttttatttttttgtaatgtctgatttactcttgcacacatccagtaaattttttgtttcagatattatatttgaacatgcctacaggaatatacctgtatacctctaggatttccattttttaaataagatttttaatttctctttattatgttaatgattttctttaaattttgaagcatatttataatagctgttttaaagtcctcatctgctcattctatcatttctgtcatttttgtgtctattcctacctggctgtgggtcataatttggatcctattttcatgtttagtaatttttaatttgatgccagaatttttgttaatctttttattttggaataaacctagatttacggaaaagtttaaagataatgcagagagttctcatacgttcctcacccagttttagtgtcctctaatgtgaacacactacattaccaaggtacatgtgtcagaactaagaaattagcacaaggcaatactatttactaaagtatagactttattgaaatgttactagtttttctaccaatgttctttttcttttccaggattcattccaagatacctgttgtattttgtggtcatgtcttcttagtctcatcctatctgacaatttctcaattttttctttttcatgaccttgtacttttgaagagtattggcctgtgggtgttttacagaatattcctcaatttgagtttgcccagtgttttcttacaattagcctgaggttgtgagttttcaagagaataccatagatgtgaggtgtctttctctgcacataatatcactgcgttaatcttgattactttgttgagttggtacctgtttggtttctccactataagaccagtcttattttgcttggattccttctctctgtgctgtggtccaacaaacctctcaagacaaagagtgattataggacttacctcatttacttaggaatcttagtcttatatttcttggtcctagtgtctgaaaacacttgttttcagttttctagctgtttatggcagaagagcaaattctgtagccctgaatccttcaacactagagtcagaagtccttggcaggacctcttcttgagttccttgcttgcagtttctcagttaatttcatagcttgcagttcctctgatcttgacctacatgaaggccaactcacagctagcattcccaagggagacttgatatggtttggctctgtgtccccacctaaatctcatcttgaattgtactcccataattcccacgtgttgagggagggacctggtgggagataatttgaatcatggggactgtttcccccatactgttttgtggtagtgtgtctcatgagatctgatggttttatcaggggtttccacttttgcttcttcctcattttctcttgccgccaccatgtaagaagtgccttttggccgggtgcattggctcacacctgtaatcccagcactttgggaggctgaggtgggcagatcacaaggtcaggagttcaagaccagcctggccaacatggtgaaaccctgtctctacgaaaaatataaaaactagctgggcagggtggtgcattcctgcaatcccagctactcaggaggctgaggcaggagaattgcttgaaccaggacccaggaggtggaggttgcagtgagctgagatcacaccactgcattccagcctgtgctacagagcaagactctgtctcaaaaaaaaaaagcctttcacctcctgccatgattctgaggtctccccagccatgtggaactgtaagtcaaattaaacctcttttttcttcccagtcttgggtatgtcattattagcagtgtaaaaatggactgatacagtaaattggtaccagtagagtggagtgttgctgaaaagatacccaaaaatgtggaggcaactttggaactgggtaacaggcagagtttggagggctcagaagaagacaggaaaatgtgggaaggtttggaacttcctagagaattgttgaatggctttgacaaaaatactgataaaggtgtggacaatgaaatccaggctgacgtggtctcagatggagatgaagaacttgggaactggagcaaaggcgactcttgttatgttttagtgtaagagtctggtggcattttgcccctgccctagagatttgtggaactttgacttcagagagatgatttagcgtatctggcagaagaaatttctaggcagaaaagcattcaagaggtgacttggctgccattaaaggcattcagttttaaaagggaagcagagcataaaagtttggaaaatttgcagcctgacaatgcgatagaaaagaaaatcccattttctgaggagaaattcgagccgactgcagatatttgcataagtaacaaggagttgaatgttaatccccaagacaatggggaaaatgtctccaggtcatgttagagaactttgtggcagcctcttccatcacagatccggaggtctaggaggaaaaatggttttgtggagaggacctagagtccccgtgctatgtgcagtctagggacttggtgtcctgtgtcctagctgctccagctgtggctgaaaggggccaacatagtgcttaggccgtggcttcagagagtgcaagccccaagacttggaagcttccatgtggtggtgagcttgcaggtgcacagaagtcaagaactggggttttggaacctctgcctagatttcagaagatgtatggaaatgcctggatgcccaggcagaagtttgctgcaggggtggggctcttatgcaatgcagaagggaactgtgggatgggagcccccacaaagagtccctactggggcactgcctagtggagctgggagaagagggccaccatcctccagaccccggaatggtagatccacctatagcctgcactgtgagcctggaaaagctgcagacactcaatgccagcctgtgaaagcagccagaagggaggctgtaccctgcaaagtcacaggggtggagctgctcaagaccatgggaacccacctcttggcatcagtgtggcctggatgtgacacatgaagtcaaaggagatcattttgaaactttaaaatttgattgccccactagattttggacttgcatgggtcccgtaacccctttgttttggccaatttctttcatttggaacagctgtatttacccaatacttgtacccccgttgtatctaggaagtacctagcttgcttttgattttataggctcataggcagaaggggacttgccttgtctcagatgagactttggactgtggattttgggttaatgctgaaatgagttaagactttggtggactgttgggaaggcatggttggttttgaaatgtgaggacttgacatttggaggggccaggggcagaatgatatggtttggctctgtgtccccaccttaatctcatcttgaattgtatttccataactcccacatgttgtgggagggacctggtgggattgaatcatggggactgtttcccccagactgttcttgtggtagtgagtgtaagtctcatgagatctgatggttttatcaggggtttccacttttgcttcttcctcattttctcttgctgctgccatgtaagaagtgccttttgcctcctaccatgattctgaggccatcccagccatgtggaactgtaagtccaattaaatccctttcttcctagtctcaggtatgtctttatcagcagcgtgaaaacagactaatacaagactccacccttatctagagctcaggcagataggaacaagtttccttgctgtggttcgtgtttttgacagtgggaacatttgttctagtccagccgttcactctggcattctggcagcctttccggggtctggtcttcatgtatgatcttagttctaccatcttgttcgagctcaaggacttgccgcttatttcctggtgcttttaaaacataaatttcttggctaggtcccaggacagctctaacttgatgccagtggttttagctttttcttttccttcatttttagccactggtgatttctgttactttcatgcaagtaaggctctgtatttgagaagatatttattacattttatccagcatttatagcaggagagttggtggagtacactgtctgtagtgttcctaagcaattccttggtctgctgttctgctttataatggcttgaaacagaacacttaaggccagcttcagtttgtcccattgaaactttcatataaaaaagaaagctgtaattttaagttacaatttatttttatttttatttttttggagacgaagtctcactctgttgcccatgctggagtgtaatggcgcgatcttggctcactgccgacctctgcctcccgggttcaagtgattcttctgcctcagcctcccgagtagtagctgggattacaggcgtgcgccatcatgcttggctaagttttgtatttttagtagagacggggtttcaccatgttggtcaggctggtcttgaactcctgaccttaggtgatccacccgccttggcctcccagagtgctgggattacaggcatgagccactgtgcctggccttaagttacaattgaaaactgtaaggtactgtgctaagaaggccttcaagtaactgatcttcattgggaaggcaggttaagtgtataggtcgaaggagaataccagaagtgttccaggagctgtacactgagagttataacttgggagtcatagtatcttctttgaggtaagaaaactggcaactgcttcacgtcagaggaggtactctaggtagggttaaggatcaagtggatttctaggatggaaaaaatttgagtgttggggacagagatgatgaaattgaaacctacacgggttttatttatgccgtgttcgagtaataagaactcagagcctattatcagtaaaatgtatttttggagattacagatattttcttgggctccaagattttcttggtaatgtctatttgggatcttggaagctaaactgagggtaagaatggactgtcagtgatgatttgttggtgaatcgtatttgcaaagagggaatggttcagtctgataagaattgcaataaagacaaaaatgttgtggcttagggcagacttggctattctaagatacagagcggtgtctaggctagatccacctgtagtcacaaagacgtaagtttaatttttttacagttactggaaatctttcaaggagcacttgttaggagctaattgaggtgcaaccaaagagcagcactcagaacctcttcagaaaagtgaagtttgcaaatacttgcttgaaacttgaatgtgcttaagagcacggagccgaatgtgacctgtgcaggttttccacacggccaggactcagacctgtgtgtgtcttctgtgcggttgttgcacactccaaatctggtctgtgtgggttccttaataagaaagtcgctgtaggaaaagctgtccatgttggaactatgcaaaaatctctgagaattggaaagttttctggaaatctattgatttttttgaaaagtaaggaggtcagtttccaataacgatgaaagggaagaaaacccaaccaatgaatctatgattactaccacagtgggtgtttaaaacagaaatatttttggaacatgacattttatgttgcaatggaatcaactgatgagggcttgggatgggggattccctgatggttaatatcagattgactagggacattcttccacgccagccaatctcaggaacacgggaagacgtgagggctccacagggttaagtgtggactgcccatggaagagctgagggtttccctataattattcttcatactcttcatcttggtgatcattaacttggcatcagcaccctttgggggctatttgtccattttcagctgtttcctcttgaactataaaggctctctcaactttgaaatgtactgaccaggccacactagtaagttgtggagcctgaatatatggcagctgatgaatacaatgatgatggtagacatagccttccttacgacgggagccgcggaaaccatcagtcagtcgacacctttctggtaacctgggcgtggttcattacccaggtggcattctcttgctttggaaatttaaaaaatggcagatttctgtgtcctaatagtggcaaatgcagctgtttttgttgttcattttagcaaactaatgacttctgcaaaaagacgaaccaagattaaaagaaatcagatgtgtgtatttggtatgcaatatttttgtattacaaatagctacattctaacccacattaaccccatgatatgtgaattttgccaactcctgctatgtcttttaaatcaaatccggtaaatcactatgaatgttctaatttctaaacaaactagtcttccagtagaagtgctttaacactgtactgcaaattagacaacctaagataaatggaccatctttgttaattgtgtagtttaattgatcaaaactaccagataggatttttatagtgattttgcttagtatcaaattctatactattaaatagcttgtgagtcatatatttggggtcattaagatatatgctgttatttagcgtctgttaaccttattaagcaccttctttttggtctagttcatgtcacaatatgaaattgcttttaattgagatgaccaacttccattacattgttcaacccctgtacaaagcacttttcatttttgctctattgatcgagcagcaattgacttgaactatattcagaacctggtgggggaagatgggagaagatttcttgaaatgttctttttgctggtggtttttttctctgcataccccgctgtttgcttgtaactaattttgcatgccagtaggtagcagtggtgagcagaggcacagacagaaagctgccagtcagcgattataaattattattcatttctgttataggtggggtgtgcagtcagttacagtaataattaccaggactagagggtttcctaggcaaccaatttcccccctcattcatgctgttgctgagagagttcctgtaaagcatgacattgctgtattctgaggtttgttgcccccctgctgctccaggtttgaggttagttacagcatcataagacgctctcaagcatagagaactcaggctgggcttaaaaagcatgccggcagcagggcctctccgctgctgcttcacttttaagggacagggttccaaaaatgcaaatcctgcatcttgcttggtaacaggaagatctctttaagttgcagaaccttttattttttattattttgaagatagtggatcatttcatttttatagttttattatttgataaaaacgtgcagagacagacctaaaactagacttctccttaggatttgagtctaataaatcagtggggaactgtcacagctaatcatggttgtgtttgttgtttattcagttttatgaaaatggctcatgaagagaaaggcagcactcttcctgcagcagcagaattagtcctttatgtagtaggaaaataatggaaaccacatctattatccgggatctatacatgaatcatattatcctatatttgggggctctccaatctttcattttaatgaacttaacatcaagtgctttgcagtgataaaaaagtagtatttgtttgtgtctgctgtgaaaaaagataggggttcatgtttcagtcttacgtggagatgtgaaatgtttatccatttacaaggcagaagtcacaaacccagacacaaggcatccgatctcgtcctctgctagatgattacagacatgttcagtgcctcacattggacctgtgtatttatcaccgcaagttctcagcaggatgtaagttgtcttcgtcagtgttcttggtggggacaccaccagcgctaggcatgaccgatgagttccttgtctgtgaaccatgactgggctcttggacttctggagctgcttatacttcctgcaggtgcctgctgtgtattcaagggtgtggtggggaacctgcagtcaagttccaggagcagcgaggctgcatgcaggctggcttggtcctgcaagaggccactgctaacaactctatgcctttagccttccctgggtttctggaggaaagctgccttctgccctggacccagctccatcctgctccggaagtggccctagggtccagctgtgctgggcagtgagacctgccagtcaccatttgtccaaaacgtctcactgagaattggcttcccacttgagaaaatcttgaggtctaggccaggcgcggtggctcatgcctgtaatcccagcactttgggaggccgaggtgtttgggttacttgaggtcaggagttcaagaccagcctggccaatatggtgaaaccccgtctctactaaaaatacaaaaatttagccgggtgtggtggcgggtgcctgtaatcccagctactagggaggctgaggcaggagaattgcttgagcctgggaggcagagtttgtagtgagctgagatcgggccactgcactccagcctgggtgacagagtgagactctgtctcaaaaaacaaaacaaaacaaaaaaaggaaatcttgaggtccagtttcttgaaaacatctcaaaggtactaaacataagtgctcagtcaccctgttagatgtgggcttatggagtgattcataaaaatgaaatatggactatgtttttgatatagatactgtaaaatgtaattggctacatgaatccatcaggctgggttcatctgtagtttaggtttactttaaattgcttaataatctttttaaaagtatttataagccagaactatgagactagcacctgccagcccaaacagtattatcagggaatcccagtttttttttttttccccctgaatcgtttaacagcctaagtagtagagtgtctcttgaaacgtagcagtctgctatacttcaggtggggacttccacacaatttagcaaagaaaataatttttaaaaatgttcctattgcatactactctgtggcataaattatttaaatgcagtgcttagccaaactaatgttacagattagatgatgaactgataacgtcatatacagtaagttaaagacatgcaatgaagtcgttatttacttatggacaactacccttgcaaaacaaagtcaggaaaagtgggtgatgttcaaatgaggccatttgaactgtagcttcaaaataatcccctttaatttcattctctgcatctctaaattctggagaaagaaggaatgtcttcatcatcagaaggaccagtctcctgtttataaaatgataaagaaagttgggcagctcctccatcataagcttgctcttctggtttttttttttttcctttaaataattgaactgttacaggaaacattgttaaaatcttaaggttagggcatgctttcatttttttttgtctaaagattactctgcaccctagacaaaggaaatatttaaactgttaaatttgaacaaagatacagtctgcatatgacttctctgaagccctataaaaattctttaaaattgcctattcactcaaatttactgagtgtagcaaaaatgtcaaaggcataaagtcagagaagattgaataaaataatgcagaaagacagattagtcatgcacagacccacacagcctttcagagcacacaataccgctctttattaccgttctatctttacaaagactacgttcaatacatagaagatgatacatggccagccatgtcatctgcctgtgattccagaactcatctatctgggcccttttcacaatgacattgatgagagatcgcagtgttttcagagcattgttttatttatcatatataatggctggtgaaagaaataggaattatgtcaccgatagcacataaaagagttgcatagaagattctgtgacaaagtttggtaaaacccagaacaaggaagctcatggaaatgttcttttctctgtcttcccccactgctgtgtcttctccccctccgttcaagtcctccaaagatttgcacgctgataactgttgaaaaatatcaagaaaatgtttcatcaagccaaacgtcggggaccctgatcctttgttaaaaaaaaaaaactctttggcgattacatttttgtttaaatgtggagcacatttcaatgacggtagagttgccggccgttatttacgcatctgctaagggaaaggagactatttgtcagtcacagttttgtatcttgcaaatttaataaagagccgcccttaagatagaatttcttaggctgccacaattgacaaaagccagctaatgttgaaatgtcaacagcaaacctcatcagcaggcctcactgccgtgcaatcaagacagcgccatagctccatataaacaaatgtatataatgtgcctgtgttgggggtgggggtagggaaactggggatttcagtgctgtggggacacacagcacaggcttaaaacagtcccttcgacagcctttaaatgttaaggaatcagtgctgtgtatattacccagagagtctcagggagcgtggactcaaatgtgactggcagctgccttacaaaaggttatcttgcctgtgctccttgggaggactgtcaatcccatgcccatgggggaatttctcttccttccttccttcctttcttttctttcctcctttctttttccttccttcctccctcctttccttccttctttccttctttcttcccttccttcccttccttccttccttcctcctttcttctttccttcccttcctccctccctccttccctccctcgatccctccctccctttctttcttttttggagacagagtctccttatgttgttcaggctggagcacagtggcacgatcacggcttactgcagcctcaaactcctgggctcaggtgatcctctggcctcagactcctgagtagctgggaccacaggtgcacgccaccacatcaggctaactttttttttttaatcttttggtagaaatgggatcacactgtgttgctggcctcagactcctgggcttaaccaattctcctgcctcagcctcccaaagtgctgggatcatgggggaaatttctttaacttcctgtgcttttggtggtgtccaagagaaagctaaagaacaattttggggagtttcatgttttggagccatgaaccagccattgcactgaacttgaaagtttttcctcagaaccctgatctgggtgttcatccacagccatctcctgctttgctgagctgtttccttgtttgcagaaatcagcacagaaccacgcagaaggcagtgtggctgcggtgcaatgctgcatttggaagtgagtaaatggaagatgagacgtgcctgccttcactgtggggggaggatgagtttcccttgtccctgaggaagattggctttggtcctgtgttctccatggagagatcttgccttttcctatcccatcactatttcctttatagatggtgggctgaagacccagaagacctgcaagtgaatggaggctcggatccaaaagctaccccgagaccccagggtcttcactcctttatggcagtgtgagtggggcagacagggaagctaaggactccctgcttaggtggatggattcgagggatggagaggctcagaactgaggcccctgtgtttgtgctggccacagctctcctttcctcccagctcattgcaacctcagaaggcctgtcgagtgcctgtcagcctcctcctcctcctttccttccccctcctccttttctgtttcctcttcctcctctttttctacttctcctctttcttcttctcctgcttctttttcattgtcttctttcagctgctgcttgaccacccaagtcaactagggcaggacagcctccgcccaagctcccagggactccaaagctggctggtgcaactctcccaccctccctgtcctgcatggtgaggaaggcccagcacactcgctgtgcacagctcattgggtcctggaagacagaggcaagggggcagacccaggggaaacaaggcgtttttggagagagctgtgtgccatttatcgtctgcagccaggacacacgttttgccttggccatctttgagtcgctaggcagtgctcagatgcccctagatggtcttccctgcctcagagaaggctcctgcaggcagatgtccaaatgtttagcagagaggtggggttggtgagaggcagcatcctcatttgtggctttcctgccccaagaggaaccactgcttcttcagccttggattcctaacaattcatttaagggaggaacacttatttattctaaaggtttactgagccccgattatgcagtagacgctggggacagaataataaacaagacaggtttggtcactatctgcatggaacctaagagtctactgagaaaaatagcataatgcaaaatgggcccagagggtaatggggtgcggcgggggagttgggaagtcctctggaggaggcaacagttaccctgacctgaaggaggataggagcaagctgtgagggggagacagcggggaccaaggctcaaggcaggaacccctggggagtgcttggtgaggctagggtttagagcacaaggcagagagatagcgagaccatgggagaacctctggggccttgctggccaagggtgggatttattctcatgcagtgggaagcccatggcgggtcctgggcaggaagaactggctcgcattaaaagaaaatcactaggtctgccttcttcagaattgattgcaggaggcctggcatagaagcagggagaccagttattacaatcactcggtgagaggatggtggggacagtggagacagagggaaagcacacatgtcaaataccatacggattcaggactgatgggcacgggggagcagggcgggcgaggaccattgctaagccctgagatggaggatcctgtggagaggctgcagggactcggtgacacctggatactcagaaaagaaagggccccacgagacattccgcagcctcatcccaacctgaggagagatccacaggggactcacactcctgtttctacctcacaactcacacccaggcctggcacggtggcatgcacctgtcatcccagcgcttcgggaggctgaggtgggagggtcgcttgagcccaggagtttgagaccagcctggacaacacagcaatatcccatttctacaaaaaatttaaaaatttatatctatgagtgtgtgtgtgagtgtgtgtgtaaaacaaaagatccaagctcaaccctgttttgttacttttaaatttttttttttttttttgagatggagtctcactctttcgcccaagctggagtgcaatggtatgatatcgactcactgcaacctctgcctcctgggttcaagtgattctcttgcctcagcctcccgagtagctgggattacaggggccagccacgacgcccagctaacttttgtattattagtagagacagggtttcaccatgttggccaggctggtcctgaactcctgtcctcagatgatccacctgccttggcctcccaaagtgctgggattacaggcgtgaaccaccgtgcttggcctactttttaaaaattttacagccctgtttttggccctgccccttcggagctccctggcctgcttggatctgcttcctggatgaagtggagcccaagtgagacgtttcagcccgtggagtgggtgtgctgcgtggtgatactcaacacatagaggacattgatgaaacacggcaccgtggcccctctactgtgtttgggaggcggtgtgtgtccgcagagtaggtggtcactggagtcatggaggccaggggtgggcagaggatggggagagggaagcaggtccctttggactgaagtggtcaaaggacttcgctgagagggaggaggtggtgggcaggctgcggagggcagagtggcgggctacgaagcgcgcagcagggtcacacgagtgacgcccggggacaggtgcagaggggccgggctggctgcttccgaggaacagggaatgcagtggcaggaaacgctcgtggaagtcacataggtcagcccactgaggccacgggaggcgaagccccacagacggcagacagccctactctagaatccaggcttctgatcactatatttttcaaaaataagttgtatcagagatggagagatgatgttcccggtctgttagttgcgatgtgacttacaacagtgaaaaattagggacaatccaagtgtctgacagtaaggaactcgttaagaataaatgattataaaaatatgtgaccattaaggttttttaaggactttaaaaataacactggctactgctcatgatttatttaatattttgtgaaaacaggatatgactaccctattttgtgaaaaagacccaaatgcaaaaatatgtaactgtaccagtatgttttagagtggatcctccagagaagctgaaccaataggatggagatctctttctctatttatctatctaattaagtatgtatgtattatgtatgtatgtatctatctatcaaatctactatctatgtaatctctatctatcatctatctaatctactatctatgtttatctatctatctatctatctatctatctatctatctatctaatctattcatccatctcgaggttgattttaaagaattagctcatgcaattggaacagctggcaagttgaaatttacagggcaagccggcagcctggagactcagggaggagttgatgttgcatttccagtccaaaggttggctggaggtggaattccctcttccttaattctgttaagatctccaacaactggatgaggcccatcatattatggagagcaatctgctttattcaaagtctagtgacttcagtgtttatcacttctaacaaataccttcaagacaacatgtagactgatgtttgaccaataactgctaccatggcctaccctagttgacacatgcgattatccattactgatcaaccccagcttctacttttgcttttactttggaggagaggactagaaagaagactgtcagaattcattggtgggattctcaggtcacttatttacatttctgtctaccttcccaactatctgataaacatactttaaataattttagtatataaaatataaaacattacaataataaaagtgttctccttgcccatctgaggaaactgtcctttcaatatctgcaaaagggccatccttgtttgtatcaattgctcctctccataccctagccatggtatcgtttcttttattatctctcaaatttaccttttaaaattacagaatcatatcatatgacaggaaagatgaaaaaagcaaaaatcacctgcactcccaccaaatgatcggcattgtagttttattgccatttcgttttagattctttttcacagtgtgtatatgtacaaaacaccatcctacttttggaaactttttaaatattccatcgcatgacggtaccatatgtttactcagccaatctcctattgttggacactaatgttctttccagttttctgttattagaaacaatttggtcctaaacagctttgtatacagctctttgcacacatctctggttattttcctcaggattcattcctagaagaataattgctgggccaattgtacttttgaaaaattggacctgagtacatagaatggctttatcacaatacttggttcacatacagtcttccttgctctatgcatggcccatacacagtataattatttaaatgatactttctttttgtttttgagacagagtcttgttctgtcccccaagctggagtgcattggcacaatcatgtctcactgcagcctcgaacccctgggttcaatcgatcttcccccttcagcctcgcaagtagctgggattacaggtgtgtgccactacacctggctaatttttgttttttgggattttttgtttttgttttttgttttggtagaaatggtctcaaactcctgtactctatcagtctgcctgcttcagcctctcaaagtgctgggattacagccaccatgcccggcctaaatgatacttttttttttttttttgagaaagagtcttggtctgttgcccaggctggagtgcaatggcgtgatctcggctcactgcagcctccacctcctggattcacccgattctcttgccacagcctccacacagcaccaccacaccgtctaatttttgtatttttagtagagatggggttccaccatgttggccaggctgatctcaaactcctgacctcaggtgatctgcctgcctcggcctcgcaacgtgctgggattacaggcatgaactaccgtgcctggccctaaacaatacttttaataacataagcccatcacccaaaacacaaactaagaacttgacgataatctatggctccccccttctctatgtccccacctctcttacccaaggtaaccatcttctcaattctctgttcattcttttgcttttctttttacatatttctcttgtttctacatggtatttcccaaagcatgtgttttcatttagttgtttttaactttaaaaggtaccatcttgtatataaattttgtgacttacttttggaattaatatgataatgctgagactctttcatattgttacatctcaacattgttcactcaatgtagtgttccactgggcgaaaatacaagctagctatcttgtatcttgtagctcctgttcaagggtgtttgagtgtttctaggatcttgatatcatgaacggtgctggcacagcattcctgcatgtctctccttttgcacatgtgcaagatttcatcttgggtatatacacataggagtggagttgctgtgaatattcaactttaggagataatttcaagctgtttttctaatgtggtgagcctctccaacaacgcataagaaattctgtggatccatatcctctccaacacttagtgttattagactattagtatttattaatcaaataggtacaaagtagtctctcattatggtcttgattgtatttccttgatcaccattgatgttactcttcttttaatatggccatatttatttactcttctgtgaaatgcctatttatgtcccttgcctattttttcattgtattgcttatgttcttattgatatgcagtccaacttttttttagttggagtcttgctctgtcacccaggctggtgtgcaatggcacaatctcggctcacgcaacctctgcctcaagcgattctcctgcctcggcctcccaagtagctgggactacaggcgtgtgccaccacacctggctaatttttgtattttttagtagaaacggggtttaaccatgttggccaggctggtctcgaacttctgacctcaggtgatccacctgccttggcctcccaaagtgctgggattacagactgggattataggcatgagccaccacagccagtcccagtgtatttttgatattaatccttgtcagttgcatgtgttgcaaatatcttgtgacttgtctctactttctgagttgtcttttgataaatataaagttcttaattttaatatagtcaaatgtgttaatctttttctttatagtcactgatgtttgtttaaggaaatctattcttaccccgaggtctaaatgatatttagctatattttctactaagaagtttaaagttgtgtttttaacatttaagtctttaatccatctggactagatttgtcaacatcgtgtgaagagaagatacaatttcttcttttcccagatggctaatcatttttcaacttcacttcttcaatagtaaattttgtttgtttttcccctactgatctgacatataacttttgtcacataccaaatgccataaaccttaatgtgaggttccctttctagactatctctctgattgatttctttttccctgcactaatatgacactgtcttagttactataggttcatgctaagtcctaaacaaggtgaggaaaggctttcctccctccttttcatcttcagaagcatcctgcttattcttgcctgcttgctccatatcatttaacaagtttctttaaaaatctctgttgggactttgaaataatattgaatcaatagatccgtctggggagaattgatatctatataatgttcaactttcctatccatgaatatggtaaatttttccatttaggatttctccgagaactctcagataaaattatataattttctctgtagagattatgaacacagtttgttagattcctttttttttttttttttttttttttttttttttttttgagacagagtcttgctctgttgcccaggctggagtcatctcggctcactgcaagctccacctcccaggttcaagcgattctcctgcatcagcctcccaagtagctgggattacaggcacgcaccaccacacctggctaatttttgtatttttacggggtttcaccatattggccaggctggcctcaaactcccgacctcgtgatctgcccacctcagcctcccaaagtgctgggattacaggcatgaggtttgttagattcttttgtaagtacttgatattatctgttgatgtggatctcattgccaggtagctcttctagctgcttctgtttattctccttttctcttagcagagtattggaatgaggctgttgagagctgggctgaaggaatgttttgggaatggatggtctggcccatttgctgttgcctgagcaagctggtgaggatctctgctctgggctcatttgggaggagagcctctccttttctctggggaagtgtcgtgggtgccctgggtgaagcagggaggaactggtgaagggagaaacacccagctaggagacactttgtagggaggaggtaggggctcccaagattcatgcttgagtactggccctgcagtctaccagctgaagacttcaaaaaaagacttaacctctttgtcctctattagcaaaggcgctcaaaggtgaggttcacaggaggagatttctgcacagagtttagaacaatatgagggattttctttttatttccttaccagctgagattggtgagccattcacattgacagaatgctcatgacaaatgaacaaccacagaggcaaagccaggctaaaaatcgtcacaaaacagaacagatgttcccaccctctgaagacagagttgtagtttcataggcctcaagatggaaagattcatccggggagcataaactaaggggacactgagcagtgccgcttctggggctttgagaaactgagtactacttgttcccttctatggcagaatgctaaggagaggagccgtcattgcaatgtgaatagaggcaactgggaattgcattaaagggacttcaaggatctcccagcttcattctgcggacagccaatgtagaaccctgcctcagtcccaatctatgtaacattcatctctaaccctttcttggcctcgtggtagctttcctccaatactccaattggggcctttgccatgatgacatcaggatattttttaagttccccttggattgcatcgaggcttctctatgttgcttgagaggggctgcccatcttgcaaactttaaagcacagtgaaaacaaccttccacaagctcccggaaactccctgatgcctttctctgaggtaaaggtctttagatggtacctagttttgtgttagaagctttcacaccaagcagccaaaaaggctccatcctcacctgatttgtggtccccagaaaggagcctgcattaggccgataagtcatcatccagagaggtgatgacagtcgtctccatgaccattgattaatgaaaacagggctagttggacccagagtagatggttataaatggtgctgtcagagaaaaataattattgtattaataaggaaacagtccaaaaccaggctctaaaaaaagagaactggcaacttagcatctccatggatttctgaggcagacttgacggaatagtggggaggttgggggaaggtattctagctcccccaccacccgcctctccagaaggcagcccctccttgcctgtgcacgtgcccacgtccacgcgtggatgcgcggtgggtgcgctcgacctgacccagctctcccgggatgcggcagatgagccggggttgcgtggaggctttcggtaccacttccagcaggaacggagaaaaacgagcatatcttattgtacctgaaacactctatgatatgtactaaatattatgactactcggggccttgcaataattgattcacccacacagccatttagtctgcgagctgttcgttttacaaattctacaatcttttagaaattctttcagtgcggaagattgctgcctggcctcagattcattatggtgattgaatcctcttcaatagagaacggtttaaagagagcacaggccccgtgcgtctcactcagagttaaggcgcataggttaaaagcttgtctggtggcataattcactgccgctatgccaaacaatcacgtcttattgtgaccttcataagatacaaaaaggcaacaggatagagcttggcttttttttaaacccactcacagatttagcttcccaacatctgaagcttggagaattcctaattaaataaccaattaataatgtagaatagaaaaagctattttttttctgaaatgcaaaatcataattaatcagagtacaaaaagctgcctgtctttatatcagaaaaatatagactaggtatttaaatattccaccacacctgaaccctggccatccgtcattgctatgacttaaaacatctcagactaaattaggttttgtttgtatagagcagtgaaagtcagatggcttgaatgacaaaattagaacatgctcaaatcactgagacaaaaccgcataaagagaaagatgtgcaggaaaagggctgccagtatgaagcagaaatcttccactgatttttttttttgaaaaaaaaaaaaaaaaagcgttctttcctatttacccaaccacttggtgtaagtataaatttttgacccccaggcagacattccaggaaaagaaaaattatccccacccccttgtcaattgcccaaaatagcatgcacagctctaaacaagtaccctccccatcacgtcccccaccccagtttctccaccccgggttggccctggccctggtgtctacaccctcagcagacccgcccaccgctccagcccacgcccagcccccgcccactgatactgtcagtaacaccagacaccagccgctaaggttctccccccacccacccgggcactccgcaccacctccaagcgcatttatagttggaaagaaaagctcatttttataggtggtgccacctccacaatttatactttgcccatgaaataccaaaaccagggagtcaattttccaaggaagaaattttataaaaacacttttattgatggaagagatctgcagagacggtcgccatctgcaaggaagcgaaggctcttgcaggtgcgggttgatccagggctgcccaagcgtccctcactcaggaccacgcgcccaggcactaagcatgttatttctgtgtcttccgaacatgctaagcatttccttaccctccggcttttgctcctgccgtttcttcctcgtggaagtgaatatttgaaacctacctggtcttcccaaggtggcccagttattactgtgtgacgacttcttcctggcttccctggtgaaaagctgttccgtcctgcctgcaggtccctgtgttactttgctgatcacattctccctcgtgtctgtgggtgtggactctacccatgacttccctgtcacctgggggccggtgccctgagcccaagccagccctgcatcggggctgggcacagggtgtactcaggcgatggtggggccacagtgcaggtttagaggggccctctctccacccacgatgccaccagcctctgtcccaccctacgccacaaatctccttcaatatataatttgctgttatcatagcaataaataatttttggtgacgtttttactgttgagactttgtgcggtgtttttttattgacaaaaccgctatgaatcaacatgaacacaataaaaacgtgagagctatctgcattacggctgaggttttgtcaatagggcagtgcattgatctccgttcctctttggggttatttgtggagcttcagcgggtgggtttaggagctacagtgctcaggaggtgcagccccgggcctggcgtttcctgccacactcccctgggcactgcctccctgaagatggcacagccacagagaaatctcagccttgcggggcaaagggaagaagacagggagctgggagagagtgtgctcacctatcttccttccttccctcccttccttccttccttccctccctctttcctcacctctcccttcctcctcctttccttccctccctcatcaaccaaagcaaccagtccattgcctggcgcatcaggagctgtgtcctgggggcctggggatcagccctcgccagctctcagggtgctcccatctggaggaggcacagacctgcagacaatgggtcctcctgatgggcaccgtgtcccagggggtatgggggtcagccctggccagctcacagggtgctcccatctggaggaggcacagacctgctgacagtggccccttctgatgggtgctgtgtcctgggggaatggggatcagccctggccagcttgcagggtgctcccatctggaggaggcacagacctgcggacagcggcccctcctgaaggggggtgctcaggcactcaccgccaccattgaccgagtgcctcctgcacaccagacttgggctggggtctggctgtgactgcggtccctgctgtcagagcagggcatggagggcaggcgacgttaaaaacataatcacccataaaagcctgttgctccccagagtggtgaggtatctaagggatgccccggggtgctcttagtagaaagcggggggtctgccctggtcgggagtgggaaggctcctagatgtggtgtctgtaccaggctcacaggagcctggagtgctcctggcaggcacagcacctggaacaagcccagtgccttcggggagctgcgaggggggcctctggctggagcaggtcagggcaggcgaggaacagggagccaattgtggtcaagagggtggggggtgaggctgggacggtttctaaaggggctggggccctgagtttttccgggcagcaggagccaatgtgacagggctccatccctctgctatccccacctagccacccccttgctgccaccatgggcctatcctctccgggatcccttcagaccatccctgcccagacccagccctgggttaccctccccgccaccctccaggtgggagaccaggcctgtacaccctccagggcacacgtctgctccccactctccccccagggcctcgcaggggagcctgcccagcctcacctgcccacaggcgggaagcacaggggactgtccccccatcacaccatccctgcactggggttgcctcttgcttacagcccccatccaaatcctaccctctatggaggcccaacagaaccaccctcctccaggcagccttcctggattgtgctgccttcagggcagggccaggaaagccaagactctagggagggagaaggggcctgtcgccagtggtgtggtccccaacctgcccaaggccatcagatccacctccctccctccctccctctctgtcatttttagggactgggcttgccacactaatgatgtctgggggctgctggttcatgtccccagtttagtgaggaaaacagaccctgacccaggcctgggggtccaagcgaggggccagcaagggcagggtagagcgtggtgtccccacagacccggggtccctccggagttcagcaggctgtggagtcgctggccagccagccatgaatccctgcacagtgcctgtgcaagtcacccacttgcctgccctgtcacgatgctccatgaggccgggtccgctttttctgggagttatcactgtccagcttggtggtttactcgtcctaggtctgtctcctccaaccagaccttaagctgctgggagcagcaggagcagggatgtcctcctggaaggacatgggcacaacggacaatctcatcaggagagaggggacttgcagtggcacctgcatggaaatcaaaagagcaccagctgtgtgctgcagaggagggggtccctccaacctgctccacttcccaccccccatcctgtctgtccagcttggcactgtcttgcagcacctagagacgcaccggcccaggatcagccaccaagcacagagtagcactcactgaagatccaggcactttttggggcacacatcaagccaccccaggtgggggtcttcctacttcacccgcaagggtaaggcctgccctgctgagggtagtcacccttccccagtcccccgggagctggctaggaaagcagggtttccctttaagggtgatgcctgcagcagccactgtggcctgcctggcccagcccccaccccgtggcacctgcccacgcggcacctgcccagggcggcccactgtgctcccggcagccctcctgacgtcaacggcagccgcggggacgctgcctcctctgccacacgttgctcacaaagtgtaggcaaaaggcaggcgtccaattgctgcggatgaggaagagaaataatttcgtttctaaatcaggactcagtaccggtggccaggccccggaaggggcatctgtcggctgcacggcagccactcctgcaatggaggagatggtccagttctccatggggacttggggggctccccagctctggccctgggtgccgaaagccctgagaacaagccatctgaaaattaggattctgcgtcgcctgtcaatccccagaagcccacagcctttcattaagatccgcctgacatttctgttatgctcagaaatcccgaagacatgccaagtgcctgctatttgccatcacatccgcctgggaagccacggggccgccaagcccattgtgctgaagtgccccccaggaggggggatggcaggacacgcaggccctggcaggggcagagggcggcctgccccaggggcagctgacagagagcccaacctggggggccctgggccttgggttcatgccctccagggggccgtgggcagcttctcctcactcacattccacgagggcgtctgtgtccacagaagctcctgcaaaaccaatcaggagctgtgacatccctcaagcttgcatggaacccttctgtgtgccagtgctgtgtgtgccccggggcaccaaggcctggtttttggactctggggcctcacgtctaggaagggaggtggatgtggaacaggaaatgggtgagagaaaagtccaggtgtggggggaggaggcaggcaggctctgttggatcaggggctttgtggatattgaccattgacccgggcgtctcagagggaggacctgtcatttggccagcatgccaggagtaaatgtgcctgaaaggtcacagagatcatagaatgtgtgctatggaaatgcagcctctccaggaaggttggggcaagcctcgggaagggagggaaggaccacattgtagagttaggtgatgtggtcacatcttagctctgcaaccaggtaccacggggcagtgtaggacaaaccacgcctctgtagcgaagtgcatggccgtccccagaaaagcatggggtagcaggaggtatgtggagggaggagggccatgcagaggctgaggaggccagtccagcattgctatgggactggctgtaacactttggattgaaaaaacctgtggtcattcaggaatgcccataggacatgagtgagactggccctgaggcctgtatggttccaggagtctgactgcaagtgacataaacccaggtttctgcctccaccaaaaagcagaatgtattggttcatgtaccatgttgccttcaggcatggctggatccaggctcctaaagagtgcaattaaggttctgcttttcttgaacagtcttagctctgccttcctctgtgttggctttattctcaccagcaactaccagcagcagctcctatcatcttagcaacccaaggacaattgctcctataaaagtcacaggtaaggctttgttggctgggctccgggcatgtgcctttctctgagccaatcactggccagggcgatgtggtgctctgattggttaatcctgggtcatgtaaccatcccacagagagtgagctgttgcctgaagaagaggcatgatgtgggactgggggatggggagggaggcagagacaatagaagtcactgtggcttccccaaagcaggtcacacattcatcgtgcccttgagcttccacacttgtcctagaaaccttgctccttctagggtcttctagcctcatgcagccaatcccagtgaagccataagcatcacataccctgtccccaagccaggctgagcctggggaatctggatgaaagggcaggtggagcccgagcatcagctcctcaccccggtgcaggagctggtgagcccaggacaaggaagaaactgaggtgaggctatgcagccatgctggctaatgcctgcagtgatcaggataggcttcctggtggaggtggaagctggagacagaacatgagaggtggacagaatatggcagacagtcccattttcaaccttccccaggagagtctcttgcacaacctggaaagtgattgggctcagaccttcacctggaacccaggtgcagccatggggctgaggtgagacagtgagaagcaagtgcagaggccctggagcttggagtggggtcccggccagctgtccctccaagggcgattgtgggtgctgctcacagggctctgtgtacccatggggtggtgggccctgcatggcgccctcagagctcactccacaggaccagccatgaggccatactttgccttgcccacctgctgtttggagaagctcgtggtactgccttggggcgaccaaacccccacttcctgtgacacagcagctgagggacctcaggtggcttaaacagtcaggcttgatgagactgagtaactacctcctgccaggccctgggagaagagagaccttctaggaaacctcccccaaccctggccaccttccatctcccttaccaccccggccacctgggagcttccagtcatgtgcatgagatcaggagctgtgtgaagcaaagggggatgggaatcacacctggtctagccttgcagggtgtggggcctggagctggggaagggagaaaggtctctggagactatgccttgtcaccacaacccctgcactctgccagagagtctattcctggaaatgaaatttcaaatctgcactcttaggcttcccatttctcgagcacccctggctcaaggcacagggatcccatggagcagtggttcctgcccctggcctcacctttggcaaggagagaagatggcaacaagcccaccaccatctgagagcatgcagagctccgggtagggagaggcccaggaagctttctgagaagggacacacatacagtattagtgatcccagtgtgtgggagggtggggaacaggttacgaaagtgtgttgtgggcagtggcaacagactcagtcaggctgggcagagggatcctggagggcagtcaggggaaggcaagacacagaggcagggcttgactgggaaggcctggcatgccagacgaagctaccaacttcattccgtagctcgcacagcaggagaatgaaaagataaagcaagtctccagaaaaggaatctggccaagctcactgacccctgccatccattcacttatctatctctccattaacccattgatctacgtatctatccatccatccatccatccatccatccatccatccatccatctatccatccatccctccattcacccatccacttacctgtccatccttccacccatctatgcacccaccctatgcatccatgcacccatctatctatccattcatccatccatccctccatccatccctccattcacccacccatctacctattcatccatccacccacccatccatctacctatccatccatccatccacccatctatccctccattcacccatccatctacccatccatccatccatccatccatccatctatccatccctccattcacccatccatctacgtatccgtctatccacccacccatccatctacctgtccatccttccacccactcatctatccctccattcacctatccatctacctattcatccatccatccacccatctatatatccattcatctatccatccacccatctatccatccattcatccatctatccacccatctgtccatccatccatccatccatccctccattcacccacccatctacctattcatccatccacccacccatccatctacctatccatccatccatccatccatccacccatctatccctccattcacccatccatctacctatccatctattcacccatttaactatttattcattcacccatctatccacccatcctttcatctctgcatctcttcctccatccatcatccatctatccatctcatcctttctctattctctccctcacctctctccctttattcacctatctattaatccatctacccatccctccctctctccatccatccatccactcatctattactccatccatttatctatccacccatttttccatctatccattcatccatctacccatctatctatccattaatcccccatccatttatcacccatccacacattcatccatccactcacacacccattcatccatctacctacccatctatcctttcatctctgcttccatctgtccatccatccatccatccatccatccatccatccatccatccatttgtccattcatccatccacccatccattaatctatttatccatcccttcattcctgcttcccttcctccatttatccatccacccttccaccactgatctacccattcattcctcaatccatccacccatcccaagagttcactcactggcatgtgaccttttgaaggtcttagtcaatggggtctggggcctgaggacagcagactttggcctctgagcatggttttcacttttgttaccaccctccagccaggagactgggcacgtggaaagccaaggactgtgctgtgtggcagacaaacctctcccctcaccagctgccaggcaagggtggcactcatacctcagctggatgatgcaagaggaaaagctggaaacaggaccctaatcctgaccaggctgggtgggcagggtagggggcctgtgttccctgtcagttcaccctgaccacagaagacgacatattctcatggctgtgcccaaatggagtgagtgtcctgagacaggacagttggaggacagaggatcacttctcccctccctccctttgagagttattagacaactcccctgtgccagaccctggtaatacagtggtaggcaaataagactggccctgtccctgggagcttgtagctcagagagggagataaacagcagtcaataatcacccacctttagttctgccctgcaccaggcctgctcatgggcagacactcagggaaggaatgaaggaaggaatgatgcctgcccagcaggatcagtggcatgtggcagcctctccatgtgttatccactctgtgtattatgggttgaattacgtcctcttcaaactcataagctgaagtcccaaagcccggtacctcagatgtgacctcacttggaaataggatcatgcagatgtaattagttaaggtgaagtcattctagcgacaggtggcatccgagacacatgcacttcatctttgagggcaggggcaggcctagcaccccacctttaaggacagggaacaggctcagcaccccacctttgaggacagggaatggacccagcatcccaactttgagggcagggatgggcccagcaccccaactttcagggtaggaggtggaccaccttatctttgagggcaggggatgtgccccacctttgagggcagggatgggcccagcaccctatctttgagggcagggctaggcccagcaccccaattttgaggccagcacagggcgcctcctcagctaaggggccctcgccggccccctcctcccagcttggcctcagagctgcaggaaaagcctgcccgggccttgtttatttttggagagttttaactggttgggcgaggaagtgagccttgttaaaagggatttaactgtgggtcaccgcgagtttgaggggcttaggaggaaagaaagaaagggcttttcccttcatcttctccggagcaggggccccttcctcacaaaggcccggccggagcggggacctcagtgccagcccagctggagggagcgttaatggggagagcttaagtcactttgggaacaggaaaggtttctcagcggcaggaaagaaaggcctcccagagccagaggaccgaggggctggacgggaggatctcctgggggcttctttcactggcccctcgagggagggcttgccctctgctctctgaaacctggagacagctcggggctctacagcacactcaagatccacccaccaccccaaatgaaccccaggaacgcggcctcaaggcccagggggctgcagacacaccactgggtctttgctcccagggagccctgtccaggggacgggaaaatgacccacagcccggcctgggacctgctgttcagggtcctggagatgccgcaccacacccctgcccctgccactccctctgtgactgaggatgggtccgtttctctggctgaacctcctctgtgtggggtcctggggtgctgccactcctcaccgagggaggagaggcgtcttccgcgtgccccgaggtccaccttcttggtcattgtcggcggccctgttggtagcttctccatcacgccgcacaagcggctgagtcccaagatgaccttttaccagagcgggtagagttcacagaatcggatcccatcctggcctagcagagcgttttattattatgggaaacagcagaagtgggttggaggggggtccatcatctcctgcaaccagataaaatagaaacaactaaataaagcacccttgccgctcaagggaaaaattatgcttgtcaattatgatttatgagcgattgccaagcggggaatggggcctgcccgccttggaggccactctctgcctccccccagcttggtgggtgaggctgggggtggcgaggctgtgctgggagaaggtgggtcctcctgcagctctgactgttaaccccttgttgcctgcaaggtcagtgcccggctgctagaggggagggaggggatctcgtgcccccgatctggcaccggggtgggcagggcatatggacggcagccattggcgaggtgcccacaccaggccctggcttcgggcccagcatgagcctgggccggcggtgggtaagctctctatccctctctgccctataaaaatccctggcagagcctccagtccatgcccgcaccgcctccgcgtcctcccgggctccccgtggaggggcaccaatttgtcctcgcctgcgcctgctcgggccagatggtgggtatttccaggccacaaagtcctctgacctttgaacagttgccgccgaatttcaataatgaaagggccttttttgaatatgtacaaatgagacgttatatttccatacattttatttccagcctcatctgcgaatctaatattgacccggagttatctgtgatggggaagttattaattctgacagatataagggagaagctaatattcgccttttacaaacacctaatattaatctcaggcgctgtaaacgagtcccgcacgccggcatgggggagatgacaccagctcggaatttgataatgaaaaacggggaagtttaatttcagggaatggataaaaatgtttgcccgctgagaggtgagcagcgccaaaagctctgggagggcgggattcccggaggacagggtggaggtctgggaggtgacctccatccgaaggtctgcgatttggggcatgggcccaggtgccggagagggaactgaggttggagccctccatccctgcggccctcactgttcgcacctttaggagctgcctctggacaggtctctgcccattgttttgttcagagctcagccaaggacttcttacactttttgtttgtttgtttgtttaacattccatggtcctgtctgctcttttttgcctcctccgcctcattcggcttctgggtcaggcatctgttgtaggctgccgtactgccacaggttgaatcatgtcccccaagcttagatattgaaatcttaatgcccagtgcctccggtcgtgacctcatttggaaataggatcattgcagagggaatttgttaagatgaggtcaccctggagtagggtgggctcctaaccgggtaagatggtgttcttatagaaaggggaaagttgaggccgggcgtggtggctcacgcctgtaatcccagcactttgggaggccgaggcgggcggatcacgaggtcaggagatcgagaccatcccggctaaaacggtgaaaccccgtctctactaaaaatacaaaaaattagccgggcgtagtggcgggcgcctgtagtcccagctacttgggaggctgaggcaggagaatggcgtgaacccgggaggcggagcttgcagtgagccgagatcccgccactgcactgcagcctgggcgacagagcgagactccgtctcaaaaaaaaaaaaaaaaaagaaaggggaaagttgagctgagcatggtgactcacacctgtaatcccagcattttggaggctgaggcaggaagatcacttaagcccaggtgtttaagaccagcctgggcaacacagggagaccccatctctacaaaaaataaaaaaaattaactgggcatggtggcacaaacctgcagtcccagctattcgggaggctgagatgggaggattgcttgagcccaggagttggaggcttgaagtgagctatgaatatgcccctgcattccaggactggagacagcacagttttgttgtttaaacctcccagtctgtggtactttggtacacaagcacccaagcaggccgatacacccacgtctccttcatagcgcttgacaccacagcaattatgcactgagctgaatgagttttgtaaactccacgagggaagggacaatgtctgcagttgcctgtgcactctgccatatcccagcaccaggcacggtgcctggtgtatcctagatgcccaaagagtggctgctggatccatggctgagtaccttgctatctccagccagaaatacatccgtaagcactcactggtggatccctcttgtatgcccaggactgtgccaagggctggctgtgtatgtggggcacacccaaacaacctgcctcagcacgtcttgatggaatattatttttatttcctgcagaccgtgggtgctaggagttgggtgagatgggggctttgccaggggttgggaaattcagaatggaaccctgaaggtagccctcaccttggcaagaggggtggtcgtggaagacctgggacaatggaaagctggggttgctgctgggggcaggcagggccttgtggcccctagcagcactgactggctgtcatcatcacaaaggatccttacactgtctggctgagcagggcatggagccgcagctccggggacaccgcagggtatcacaaaggatggttcctgtctctcccgaaacacaggtgcacttggcgctccctgctggagggggcttcatggtggaatagacttggtgcccttagatcaccagctgccagaactggggaggacttcagtgatcatggagttcatcccgcggccaagttgtcaagtgaggaaacagaggcccagagaggggtagcaacttttccaaggccacactgcagctcaggttcagagcatggggaggaccctgccccggccctggacttaggggtcagatgcttttccaggaagcagggattgaggaagcactggcattgataggcaactcaagatttttcctttcttttcccctcatttcccctccatgaaaacctgagtcttcagcatttgatgggaccccaggagctggtggctcttctgcttccccacgctgctccttctcgcttgctcctctgtctggccaccctggtcctcacactaacccatattcaagccctcgcagccacacgcagtgatccttggggtgcccacactcaaccaggccatatacaaagtgcatctttgtgctatgcttgtgtgtccacagggccacacacaggacacaccccacacacaggcacctcaggcatagcgtgaacacgcacaaccccgcacacacacacacacacacacagcccccccccttcacccctcaccattcccaccccaggcagttccctgcctctcctcagcacagtgggaacaagggatgctgactctagatgagctctagggaaggggttccctaggaatagaccactgcagaccagcttctcaaaatcatgacatgagccagacccacaaacccacatttcaagcagagcctgaggactaaggcttggaggctgggaaaaccaagtgctgtggtctccttcctcctccagtctctcctggtcacgtggatgcctggcctgtggacacgccatccactcccatcctttcccatcccctgcatggctcatgatcaaggtgacggggggaagacagctgtccctctgcaacttctgcaaactgcaagccaggcctcctccactcctagcctctggcattcctggaaaactgggctctcagcaggaacttccaacaggttctaccccagagagctggccccgactccacctggatccaagcccaccggctggctaatgggctgggagcaggtcctgccctgccccgggaacggtcactgtggttccatctatcccagggcggtttcccccctggagcccttctccagcaggagagcactgaatggcgagccactggcccctcgcccgaccttcgtgagccaaggctgagtttattgtcagaaagatgactaagaaatccccgacacagtgtatcatcagcattatgattggagaaacaacacctacaaaatctatgattcattaagtgtaaccaatatataatttaaaacagtgggttttgtcaaataatgtgaggtcagcataattttctgcctattactaatatctataacatctttgccttagtcagctctatttaaatatgcaatcatttacagcttttgagaatatttctgtgtactcccaatttccaatattcaactacgacaaattttatgctgacatcaatagcaaactattaaagacagtatttcattattggtttttcatcccaaaagttatttacaattatatactaagcactaatattaaaggaaaccatttaaatgaggtgctatctactttaacaatatgtctgtcacagaatgagattgtgtttaaagattttatcaagaaatggttgtttgctgaggttatgttttgtccatgaaatatgcatttcatatctctttcatttcattaacataatttaatttgtgctttgcattttgtgcataatacatatttgatttacaaaacaaatatttccattagaaaatgaatttcatgcaggcaaaaaagcagaaccaaatgatgtattgaaggaaaataagaagaaatgaaatgcattttctcagtctattaaaaaatctatggcattgacagaaagtgcacttagtgttacgtttaaaaaatagcacatatgtcaatgtattaacaaatagaattggaaatacaaatatttccctatatcaagccaagaatctctttattttaattgagttgatttaaaagcccaactacaatttaatttttatttcatgatgtggtgctggggctggtgctgttggaactgcgtggggttggcggttgatggaagaagatagttgaccttaaaaatggcttttattgacaatggagagacatggttgaataggaaggaaacgggaagcggggcctttgtgatctggggggctgggagtggtgagcggggctggcgggctcctgagccgctcctggcttggctgttcctctgccaacccctccccagcccctctcatccccacctggggctgctgggctgtttggggacccaggaagtgaggaacgtgagtctcccttagcccacgcccgtgatgggggctctggagttagaggaatgtaggagctcagggctcaggatccactaggaccttgctccccctcccagcccacaggggagccccctccaggccaggagcgggctgtgtatgctgggggcaagtgcatctcaaccttatttaaaggggatgtgtggggctgacagtggttatgtcaacaatggaagaagtggctgagatgcccaggtcggtcactgacacagggcaccgggcaggacccccaacccactggcccaggcctgcctctcccacccctcactgtccccaccctaggcagtcccctgcctctcttcagcccagtgggaacaagggatgctgactctaggtgagctctagggaagggggccctaggaataaaccactgcagaccagcttctcaaaatcagatgaggaaactgagccccagggcatgatgttgcacagtgggtctgtggccaatccgtctacactggctaccgtgactctgctcctattccctaatctgaaagctctttcctgtaccccgctaatccacacccagcctaccctgggcccccacagaataaggaagtagcccttggcctgccagcccctgggacccacgaaaccgggtgggaggctctcacctgccggctcagcctgtcgggaagatcccagtggcctctttgttggggagggctcctcagggcgcctgagagcctctactttatgtatgcagagggcagtggtgagcatgcggatctcagtgtggctgaggtgtacagttgcacaggctgtgcactgaaccacagtaggagtgtctttcacatggatgaacacgagaagggctcccccaggaattgtgcagtgcagtagctctggctctgcaccagggctctcaaccagaaggtaacatcacaccatcctcagtcatgggacatcacaggcagggatggggctgctgccacactctcatacacatttacacatgctcagacacactctgacatactcacaactcacactctcacacatgcacactcctacccacccacatgcacacacactcatccatgctcaccaccctttcacaacctctggaggccctgagggccagcctgcccacctgtgcccaacctggcttgtgctctccccatcggaacggggctcccctgaggctgggccatccctccctgacagtctccctagaacctccaggccagaggagcctgggccaccgtgcatgtgggcgatgttcacaggccttttggccacaggtgccaggccaggggctgagggggacaaggagggcttcccccagtatctggatgggatctgtggactgggggtgtgtgctggccagccctgggatgccctggttcctgcttaaaaccttgccccacttctccagcctctgcccctcccatggcctctctgccacccagggccagaggagaacgtggtttgtaattagaaaaatctcttttctttcaatcccaaggactgcaaaaaatagagagggaggaaagcagcagagaaaccaagaagctgaatttccactcaggagaggcatgaaggggagtaaagagggttggggcaaggcctcccatctggggccgggatgcctggctctcctggtgcctgtcttgagacactgtgtgtcaggagctcctggacagcagcagatagctctctgattgcccaccatagtgggcacccagccccagcctgggctcctagctgcactgcctggggctgatggggaaccagagagccctctcggcctcgcacatctctgttacaccacggggctgctgaggccactgatcctggaggggcatcacagagggtgagccccgcccattcagatcctgtcccaatgcccacctgtggtaacaccttcctttctctcaacctggcctttctcacccacaaggtgggaatggtgatttccacctctcgggagaagagagaatgggtaagaactggctcactggggactggccatgggctgtgcgtgaagggagctgccgggacagagcgggaggtcctggctccccggagtacctggccagcattcccttggccaggaggaggctgggaatgtgctgatacaggaaagcagcctgctttctgcctggtatattggaaagaaatccatctctcggggaggacaacctcatcatattagaggtatagatttctggcttcagctgggacagaagtcctccttcccgagagggaagggcagtcttccctaccttttacagctccttcagagaccctggggctgcaggggccagcgtctctgggaagggctcaccaaggtaaggtggtcaggacccagtgagcctttcccagagagggttcaaaagaatgtctggggccaagttcaggtctggggccatgtccatccctgaggaatctgggagctgtctcctccccagccaggtgccatctcctatggccccgacccagccacacatgagacaaggcatcccatgctgatgtggacagttagtgtgtgtcacatgacaacacgtgtctgcctcacctgatgccaggcactgcagagactaaagcctgggaccccctccccaccaacagtgaagcacattccccaaagggaatttatcctggagctattttaacgacagttcgattgcaatactttcttttattatatatatttaatttgtatacaactaatataggtgcagaattttaaacagcatgtcacacatggagtgaaaaaaaaaagcagtctctgttttatcccttctcaccctgattctggctcccctgggggccactttccactctttgagctgttctaattgccctgggtttttttttgttattgtttttgctttttatttttgtaatgtaccattggtaatttatgccagatttctcaccagaacggtgaactcttatcatgattgttgacatattcggctgtgttctgtttctatttttttctcgaggatgtccttctgacagtgtttggatctgctaattgctcccaagaattggggttcagctgctctcccggtgtcttccttcagtctcagcctgcaaatcgcctttgccatctctgttccataagctacctcttgctctttcttggtttacacctttgttttggtggtgcacatcctccagtggctttggaaaaaaggagcttggaaaatggccttttaaagactttgcatatttgaaatgccatttgtccaccatccctcttgatcaacccattcaattggatctagaattctaggttgagattatattttgtcaatgttgaaggcattacttcatggctgtcttaattcctgggtagcttttgagaagcccaatgtcttctctcttttctagtcccagtcttttgactgtggcttgttttgtcctctgaagctttaagaccctttccttattcctgtcattctgaaatcctgcaaggatgggctctttctatctggagactcatgtcctgtaatcctccgatgcctccttgagtgatttccttcgaagtgctctacccagacttttctcagtcacatctttctgggactcttatgagtcctctatttgaacttctaactctgctatccactctctccttggatcttatctttcctctcctattttttatattttttctttctgttctactttgcaggggatttccttaagtttaatttccaaccactctattgatttatttttaaattctgtcctcctatttctactttttaaaacacttttttcattctttctttttctttttctttctttctttgtttttttttttttttttttttttgaaatggagtcttcttctgttgcccaggctggagtgcagtggcgccatctcggctcaccgcaatctccacctcccaggttcaagcgtttctcctgcctcagcctcctgagtagcggggactacaggtgtatgccgccataccaagctaatttttatatttttaatggagatggggttttaccatgttggccaggctggtcttgaactcttgacctcaggtcatctgcccaccttggcctcccaaagttctgggattataggcgtgagccactgtcacccagtctttttctttctttcttgtttattttagcaaatgttctttttgtcaatctcccattcctgtgtcatggaatcatgtcctttcttccctctctggggggttcatgatgactttgtgggtgtttcctcttgcccctgcattgcctgcaactctcacaagttgctcttttggcctctgcctcttgcattggaggctttcctcagacatagtggccgtcttggaatgaagggccagaggaattaaccagaaggtttgcagacagggctggctggctggggccttgtggtgggtgacggggaatgaatgcctccttccctgggaactgtcacatgtggcatccactagtctttcttttgggccagtcattttttgtcagtgagaagtccgctgatgtcctgtgggcacggaggtcagttctggggtcctgggggaagctggggctcaccattccctaagaagcatttctacatatcttgtttttgtcagggggtactgcctctgctcagcttcagagaaggaactccactttctgctaggctgatggccccctcttttggccacagagggctgggagattactggggtgactctggctctcagccagccctctggttttagctctgtctacaccccatgctcaaacgtacctgttgcctccagtccctgagtgtcccctgctgcagctgcatggctgctctcactcactcggttgctgctgctcatctgctttctatctgcctcagcctgttttttctgctttaacaaaatccccaagactgggtaatttataaacaacagagatctattttctcacagttctagaggctgggaagtccaacaccgaagcactggctgtggagggccaagtctctgcttccaggatggtgccttgttgctgcatccccctggagggaggaacgctctgtcctcacatggcagaggagcaaaacagcaaaaaggcctgagctagtgccctccagcccttctaaaaggcatggactcaccccaagggcagagccctaatgccctgatcacttcacaaaaggccccaccccccagcaccaccacaatgaaattaagcttcaacataggaattctggaggagacacattcaaaccattgcatcatctctccaactttttgtcaaaatccctttttgtgttgtctcccttcccattctctctgctttgtggacttgagccttttttattctcttactgtcagctgtgggatttgacatgaaaacagagaggtacttgcatggcgactcttccccttgtacccagaagaacacgactgctggatagctctgtgccagtcccttcctgtcctttggacccaggttgctcatgtgaggaagaggaaagtgttggggagatggcttctcaagtatggctggctctggtggtgtttctgggctcttctaaggtctccggaaaccttcatagactctgcagaatgaagcaccacagcttggtccagggcatctgcagattgagacggccctctcttcctcccagtcccagctgactccaccaggatccagcacccagcaatgaccacgcaaggagcccactggccccctccccagatgctggggcattccttctctcacactccggccaccagggtaggagtctcccagctaggaccctagactcctaaagcttcatgcccagcagagatgtgggtgtgacaaaacagggagtggtagagaccgtggctccaggcagctcatgttccctcaaaagacatgcatttcgaagctttcgtaacactaagctgtcttgtaattacctacgtaacactaagctgtcttgtaattacctacgtctgccagctgtatgctttgttttaaaatatagtatattagcaggaaatttaaggtgcaatacggccaatggatcaggagacaactgccccggacaaggtggttagttactcacagtccccaccaggagggggcatgccacacccccagggccacgtggggcagcaccaggatgggtcagaggcagaaggagagaggggaacgccaggccaggacctccattgtggtttccatgggcaggaatgggaaagggagggtaagcaagtctaggagggctagtctgtgtcatttcagcagctctggggcacagggactgtccctggttctctggtacttggccctggggtgatgagagcaggtggagagtggcctggaggacgagagccagcagaggaggtggtaggattgtgggctctggatcagttgggttgcatttgaaagtgccttgctggtggtgagctgtttaccttctctaagcactggctggctctggcaggggcagccccttctgggccagcaaggctccacatgtccaaacaacagaaatacagaaaataagagacgtaactcatgcgttcctccctcccggctgctggtgaggcaccgctgctgggcatcagggggctggagaaggtgcagacctggccatgccagaggccgtatgctgggggcttcctcttgggctgagggggttctgggctgtgtgggggaagagcaagttctgtttaggaaatcctaagtaaggactcaagagggaacaggctgcattgggtggtaaggggtttctgggtgagggctgtgagctggcttgcagaagaagcaggactttgagatgagtgtggctatatgaaggagacacccctaaagagaggggggatggtcaccaaaagctatgccataggacagccctggccactgaggggtggggcctgtggctgtgggaagttcttcctcttccacttctctgcccaccacccgtccctgccctctcctcctccttatctggggctgtcaacctgtggcccagttctgtgtgtcaattggcctctcggaagtacccagcagcccctgctcaaatcccctctccccttgtccggtgtgacctggcaggtgagtccctgccaaggccttagggtgatggggtactgtagaaagatgggtttgtgctcccctgttaatgctcctgctggctgggagaggctgggttaccaccccatggttcccagacgttggtgggtgagggagccggcgtggggcgttgcccaggggagggatctcctcaagtggttcctgatggcgggaaaataaaaatggtgatttagaggccgcccccactcgacgggctttcttagccgaagacgttcagctaatgaacctcaagcagattcatggccgggtgtgaagtcaacggagtcctcactccgtggagacgagcagcataaatctttgtttttaatgtctaatgatatgtaaaatatttaaatttgcaacgcagaattattaagctgccaaggttttttttgcctattaaagtgtattcttgcctgagaatttatggggcaccctgtggccgccgccagcccccgttaggggacaggaggtatagatttgtggtctcctactgtaaaaaacttcaggatcgcctgaccctgtaaactgaaaattcatgtctctcgcccggggacaaatgcattctttgtaaaggcggcccgtggccagccttgggctcatgttagtttattgtcactggttgataacgtttaatggaaaagatacaagagtgccaaagaattttaattatttttgtgataaagttatatgttcggccttgaaaaagtagagataatgcagggattcattattattcccagtgtgtttaaacagacaacgcagaatgcaaacaaaagcagatgaaatttgaaaagtattatcaatattgcagatagcagatgccctttcgaatcagaacaagcatatcttctatagcaactttatggttgagtagtttattcatttccattagaaggttgtacgtttctaaaatatgtagatggtatctagaaaaaccaaccaaccagacgggtcattctgcttgttttcctaaatttattatttcacttttgcaggcccggatctgaggggcattaacaggggagcagagtcttactgtgtcaaattctatcttgtccgtgacctttggcgggctatgtgctggcacggagaggaagttggagcgaggtgtctggaccatggcgaggtttgcgtttgccgttatctgggttgcattggcgaagctgccagtcagggtctgcctgcctgtcgttaaactttccacattccctgggctccctctggcacccgacggagggaaacagagtccaggagaaaactgcacacacccctcaccatccatttcttttccccgtgccctctgccctggattcagatgtgcagaggtgatttgggtcctgcctcaatgtgtagaaatggacctgacttcttcccagggctgtgggcttccttggcattgtgccaggggatagagttctggctttcttgagcagtcagggctttccaagttgtgccagtttttttttttcttttttttttttgagacggagtttcactcttgctgcccaggctggagtgcagtggcatgatctcagctcactgcaacctccgcctcctgggttcaagtgatcctcctacctcagcctcccgagtagctgggattacaggcatgcaccaccacgcccaggtaatttttgtatttttagtagagacggggtttcatcatgttgacaaggctggtcttgaactcctgacctcaggtgatccacctgcctcggcctcccaaagtgctgggattacaggcgtgagccaccatgcccagccgtgccagttgttttttgaggttaggagcagtccctagagaaccaactgatcccaaagccccaccaactcctcttggaacctgatcgccttcctatcttgatttttgtttctaggaaatggatcaattcttgccctcgtgttcactgaatgaagtaacttacagccccagctttgcagccagacagagccctgggcaagttaccctggcctcggagcccccacacctgacaccccacgtgttctcagctgtaacgtgggttgcagacacccgtgttgccaatgttattaccatgattgttgttttcttccactggcagatgcacaggaaatggctctctctgctgaactgagcacctctggggctccttcctggcctggggtttctttgagacaggcccaggagagtgacagccgggcctgagagggaaggacaggctgtgactcacaaaggtgcaggagtcctctccccgggttcaccgggagctgacgggctaggccgtgggaggccttgagaccaagctccgactttggagatgggccaggcttggctgggcgcctccagtggttttgaacagggggcgccatgagttaactggtgctttcagaaagctaaacctggcagcaagtggcttcttcagagaagggactcacccaacatcagaatgtttaccaaaatcaatcacgcggtgggccatagagaaagtctccttacactgcaaagaatctgtgtggttataccgtgtctgcgatcacagtgaaatacaactagatattaaaagcaaaagaatagctcagaaattctgtttggaagctaaatagcatgtttaaaatagaaacaataaaagaaatcagaaaaatcaaggatggcatgattttgaggatgctacatgcccaaatgtgtggcacacagagagagggaaatctatgcctttaaatctatttatcaggaaacaagaagggttgaaaacaaaccagctaggtgtttgctcctagaaactggaaaaagagctacagagcaaacctaaaggaacaagaaagatgacaggaataaggacaagggcaggcacaaataaatagagattagcaaaggtgcagacaggttttttggaaagattaacaacgacagagggagggccacgagatgatgctgtcaggagggcgtgcaggacacaggatgctttgggctgtaggtgtggggaaaaggcaaccaggtttttccatgcatctcacaggactggtttgcctgggacagccctggtttctgcctgttgtcctggctatcactcatggcatctcccatcccctcaaagggtcctgctttggaaggtaactgacaccagtgctgtccaataggaactgagacccttatgtaactactgagatgtgtggttggtgcaaattcacatcagattttgaagacttagtatgagaacaagaaagtaaaacatctcatacatacgtgtgtgtgtgtgtgtgtgcgtgtatgttttatttttatttttatttttttgagatggagtctcgctctgtcacgcaggctggagtgcaatggcacgatctcagctcactgcaacctcctactcccgggttcaaatgattctcctgcctcaccctcccgagtagctgggattacaggtgccaccaccacgcccagctaatttttgtatttttagtagagatggggttttgccatgttggccaggctggtctggaactcctgacctcaagtgatccaactgcctcggcctcccaaaatgctgggattacaggtgtgagccaccacacctggcctcattaatattttttatattgattacaagttcaataatattttagatctattgaattaagaattaatacatcactaaaattatttccacctggttctttgatgtgattactagaaaataaaacattacttctgtggcttgcattctacttttgtgttcagtgctgattgacacggtcaccccagccatgggcgggacgctgggatgggcctggttaaaggcaaaggcttcggttcagatgcagaccccagcactaacttgtcttagtcaaataataccaactccttacgtttcaattcccccttctctaaagtggcagtaggatgggtctcggtctcctaagatttggggaagttccacttaggtaactcgcgtaaagcactcagcgctgtgcggttggcattcattaagtattagttgccagtcataaaacagcataacgatgagatgcttttccccccacagccctgtgatgccactttattgcttaggaagtgatggtacatgaaatgttcagtggcttgcccatggcctcaagagagcaaagctggccttcccacctcaccacatgacactggggtaagatggacagcgggatctgttgcctgtgctcctgtgagccggctggcctggcagagggggcctctttgcttctaaccacccttccttccgccagctcatcctactcttccctagaagccatctctgcccaccagcccccactaatctcagcccatcctggcctcgagtgaggagaggatgttctcttggccttctctgcacactccgggttccccaagtttggaccttcgactttccccctctttctccccacttggtgcccccagcacgtagcatgaagtttggtcctccacaaagcttggctgggagcttgacaaatgttccttggtttgtcaaacaaactctccggcttgaactaagtgcctttctttcagatttcagaatggatgggcctcagccatggcaaatctgagagtctttgtgtgcagaaatgcccttggatgcccttgtctgtgcatggttgccagagctggtcaccccagccagacatgctggtctgggcacctcccgggaggagccccgggtgatggcacctgttttcatgaatgacacagcaatctccacttcagtaagggccgaccatactgttgattcctgccctgagacccttctcccctgccctggttctaagtgtagatccctggagatctgggactgaccagatgagactaagagggagcgtagacaaggagccacaggaggcgacactcccggtggtggattcctgcctaagttccagggaactcagaatctgggggccacgctggcaacatctgtctcttggcttcccaaagaaagactaacatgccagcaaagccaggaaatgtcaagaccgagagctcatgtggatgtagaacttcacagttgacaaaatactttatgctcttttatttaattttcacaaaatctctgctaaagagtggtgttattcccattgtatagcagaggaagcccagacaagcgaacttggccaagaactcacagggcttgaaagggacccgcctggtcccagggatggggtgtcaccagctcgggctgggcagcctgctgcctcgaagtctaccctgtgtaccctgttgggtgaagagcatcagggatgagaggagattcttgggaggcagtagaaagggtggcaagagcttgtgctcaggagttggataggagtttaaaccctggtgctccccgttgcgtggaaactaatgaggctgtggacaatctcttcgtctttgggggtttccattttctccttgggggtgttgctaacacacctcacctggctggtgtgagggtttggatgacgtaatgcataccagtgcccaggacagaggaagcaccctgtgaatggtggccactgttgttaccattgggccagagatgttggagaagtccctgagtccaatcaattacctgggaggttgaagccacatgccctgggagagggcaggtgaagtgctgttgacggaggcccggttccctcgaggctggggggcacctccagcttccgactcctcctgttctccaggttcctccaggaccagaccctgcagcccagtctgtcccactcttgcagggtctctgaacctgaaagcagcttgggaggggcgttctgttgcgaggcgtagagtgtttataagaggagcctggagaactggaggagtccgaggttggaagtgccaaccagcccccagggaaccgtactgccttggcagcatgtcactcactctctcccagggctgcatcgcttcacacttccagtcctctgtatgtcttctgtctcctgtctgtctgcaccaatacggtggctcgcccaagccccatgaccgtgcagggccggatcccaccactgttgcactgcttggccagctcagttccaacaggctgtcgtctggcttcctgggccctgcatccagccctgaattagccacgtgtcatgctacactcaggcctagccataatttggaaggggacaatggctagcttgacggggcggacacactgaactgggtcctaggatcagcttgcgcaccccgtggcgtgatcagaggagacttacgcctacacattttagggaccaagaagggaggtggccactttcatcatgcagctgtctccacagcctgcatcctcggaaaggagccacgatttccctgcctggctgctcccagccaccgtgggtgaagaccccagcggctttccgtggggaccagctgaagggactttctctgagtgccagcagagggaggtgcctctgttttctaagctctgcccttctttgaaaattgagctgcttaaaatcaacccatttgggacaagcggccttgactcttctcccatgatgtgcagggctaatgttaaaaggtaaaattgtgtgcgggttcccaggcaatcataattagagtaattgtcctgtgttgcaggcacccctctttcttggaagcttaaagcactctgtgagcattatccaattaaatctggaaatagccgggtgagagaggtggggacagaccatgcactgtttctggccagaaaacagcagccgtgagaggttaagtgacttgcccaaggtcccagagtcagaaactgagacctgttcagcgctcagtggattagcatccaaaaagcatttactccacagctgcagctcacacggcaggtaggaagacccagtttcatatgagcggcagaaattccccatccagctcccaggttgcagtttgctctgaaacccagcggtgtagcccccaccctgcccaccttagctgactactgggcctcctgccctcctcccagctcctgcagacctttgaaggtactgacgagcctaaataaaccttcctgtagataacaggtggtggtggccaagagaactaaccaaaccagatacattttatgggttgcagaacaaattaactatgaggaataactgtttttgagaaataacagagttataattgtttaagtagctctcttgctggtgtggttttatggctagcctctgctgaactatagacaccccaacccacggggcagatgggcagtgggacccccacaagtggctttgaccccaagttccatgacagaaatggactgtggacaccccaggtcatgctggggaaaccggtgggagagggtgaggccctgctggcgacccgtgagagccccagggtgtgctgggacacgggtgggagagggtgaggccctgctggtgtcctgtgagagccccagggggtgctgccatggacagcagctttgctggaaagtcttctccatgtctgggatgatgactggaaagacggagatgtgggaatctgtgaatgcttctggggatggcctccatgccagagtcccagagcaggagtgtccttagcaaatgttgtacccaaccaggagaagggacgggccaagccctgtaaggtgcatcaacatttacacactcatcacaacacaggagtgccaggctctggagaggttccagggagccaaaatgaaataacaaaaaccaaacaaagccccaggtccttgccctcctggggcttgttgtctcacgggggaagcagacatctatttttaagagccacacggatacatgtattatttatgtggtgaattccaggaggagtggggcccgggagatgtgtggataatggagctgggggcggggaccggcaggagctggggatgcaggagactccctaggaaagggcggttgaggaggacctggtgggtgtcaccaggtgacacctgtgaagtggcatatgtgtgtgtgcatgggtgtgcatgtgtgtgcatagaaaggaccggaaggaagctgtcccagatacagggaatagtaagtaatagtaaggctccccagtgggaaggaaccagagaatgcataaagggtaaggggtcttggtgctgcatgaaaaggaaccctatgttcaatataccttttttggggtgatgtaaatcatggaaattcaagtccatctaaactttccttatgggactgtacaagggagagcatggagaggcttaatgggggcaagtgtaggagagggttaaacccaaatggcacggcccttccggctggtccctggttactaagctgtgcctggattacagcacctggggccatggggcccccacccggagggctgcagagtgagggtccctggagcctgagtcctggctggaggcccagaggccaagggattacatgatgacataggggattggcacagaagaggtgcggccagcatgattacatcgtccgtccctcgcagcctcccaaagaccacggtccaccttgactgcgtctgctgccaaggatgaggccttttgagcatctgccccaggcctgtcccagacacagcgagtgagagggaaatcttcagagggctgtcagggccttgctgctggagtgtggccccaggaagtcattgggtgggctgtgggggccccaagtgtcctgtgacaatgtcgtctagggcctctgcaggtccttccaacagtgggtctgcactgccaagctcactcatttcggctccccccactggcccccggtgacacagggagatgggcaggtttgcctttcacagggttcattactttgttatcaatgcctcctgcccctgccccccacttcctgcttgctgcaaggtcccccatcttcaacagtgggtagtgggcctgctggcctctgaggctcagccccagctctgattgggaccagggctcagtgggctccttcctcagggggaggtctcaggctcctggtgaagccccctgagcttcaggaaggtaagtgcagccatttgaacagccctcattggccgccttcccattgtggagaattaggtggccgggctcctccctcccaccctacgattatacaatagatttaaagtctctgatatccacaaatctacatcaaaatatattctctagctgtagggaacgtctcagaattgttaaccttctccccaggtattagaggtaacacactgtgagattagatgtatattttcttcaagatacaccacccattgaggggttcatatttacatcttttgttgatattttttatagattaaaagcgcctctttgctaggtgataattctgctaagtactgtaatttgctgccattaatatttgtctgagtcctagtttgcaaaatatatttgaaaccacgttagaaagtcgcataattgcttctttaagctggggaaataagcagtttctttacccagcctttatcctgttaacctcagaggggaggggtgttcatggagtcctggaatcggctgagcacatcggccattgaattccagtgcctactgggggagacggtgcggcccggctgggcccagctgcgcccagctgctggtggcttctgggctgctcctccctgggccaccgagggacaggagacccatggagaatgcaccacccctgcctgggtcttaggccctggggtgtagggagagctgcctaacccctgggagccaagacaccgctcttcctgggcctctcttgggtcctcatctggaaaatggaggcactggcctcccagcctgactctcccaagggagggtgtggaaagccccgcccagcaatcagatggctctgtgcctgtcccattgtgggcgttccacaaatgttcagggcatgtgtaaatgacacagctggtggcctggccaagcctgatccctgggagagtggggcttacaggggctgagcatgccaggactcacagggctgggtggtggggcagggggctctctgtgatcaagactaggggcaggaggcccagggtgaccagcacctgagcctctggtttccaaggcagctggagaccccggctgtctcctgtgctccccacaccacacacacccaccctccaggcctcccaccatgggaacaggcagctccaggcccttgcgagcaggtggattctatagtcatgggactgcttacaagaggctgcaccacacagatagaacatccatctgtttccagtttctgtgcgcattcttcggggtcttctcttgcaccccaaggtggcaatcaactgggatatctctaatcagaagagcattttgccttctattgatctgaaatctttcctctccaactacccagcagctgttcccaggtgtgagctagggcaccatggagcaggactgagctctcacctccaactccacctcagccatcaggagcctcctagccagcctcagtttatccagtagtgagatgggggtaatgatagccctgacctaacagtggtgtttgttgtgaggattaaaagagtgaaggtgtggcgagcatttggaatagcacctagtgatagtataatagcatttggtaaatgttattggatattattatatggtacatccatcagcgtgtagagcgtgtatctttgtgtgcagagcctgtgtgagtgcgtgtgtgttctcactatgtgcacccctgtggatgtgtgtgacacacagtgcacatatctgtgtctagaggggttgcccatgtctctatgtgtgatcaacccaggcccacacgcttcctggggtgcccacaagcatggtttcctaatggcttcatctcctgcccctcaagttctgttctttccatctccccatgtcaccctcctgccttggctcccagcccagcctgcacatggcctgtccctcccaacccctccagcctgcccccacctcctgccattgctcgaaataccttcagggatgttcaggcttttgccctgccattctcccggtctggagcatcctcacttcctcttatctgggccaacttccactcctgcatggattctgactgaaatgttgcctcctctggaccgtcctcaatctctcaggtcccctgcattgccctcatcctgcagccctcttccgcatggtgccagcagctacctgctcccctgcgtaggtgcagatgcacctaagttgggagccctgtggctggggctcactcccatggcctccctaactcccgtcctggctgagcccattgtggtccacacaatcctgtcctctgtggctcctgagagtcttggaccctcaattcccttgctgaaggtggaaaggctgtctcaggggtggggccagccctcagacacctggtcatcacacacctggttatcaggcacccgtccatgccccagcatgatgtagtggagggtggggtagtaaagggatagtttgggtgaagtcagtgagtcagctggctctgctgggctgctgggctcaagacagtcgggagcaggtgcccagctcgagagaggcccctctagcctaggctggtgcctgggcacagcatagcaaggcagattgttgtagggtccagcccctctgagctgggagtacagagactgccctcagcttgcctgggcctctctgcctgctaagaagcttccaccagtggccagtgcccctctcccaccctgcagtttctggtatttggagggcaagtgcttgtgtcttcaggcgtgacccccatctcctcctcagattcctacaagatagggagggtacctggtggatccctacttggctgaacaagaatttaaggctcagagagaagtgagtgaccccaagtcacaaggctcactgggccttgggcttctgatgccaaatcgggttgttcctgagacccacaaaaggtggtacagccacccaggtccaaagaaaaaagctcaaggcaggaaaaattggggtgattgagctgggtgggggaggggctttgctcagcagatcctgatgcaggcccagccccagcgaggcccttctctgtgcatacccactggccttgccctggccacacaggccacagaatgggctctgcacactgggctgagggagggctggccctggccctggaggtgcagtgccgatgaccctacagaagcctgtcctgaatcttgaggggttgggagactgggtcatccactctgatggggtgaggccttggggcaaatcccccagcatcagtgaagtgagctggagcctgcagtggggctccggccaccagctacatgcactgcaccttccctcacttgccagccctggggtgaaggggacttacttctctgagcctgattcctgtctgcagagtggtgaccgtcctggcacctgcttcccaggagcgtggcgcgcattagaggagatgtgttcattcgggtttccacagaagtaaactctgagaggaatctgaatgtatttgggaggaagtgcagggagggagtaggagaagagaagacggccaggcgctgtgctcagaagcagcttagggccactggtaacgggggcttgggtctgctggggacctccagggaacagcagagcacaagagccctgggagttatcttcccagagggcaaggactccaggtgattatccagcagtttccctcactggcaagggctgcttccacggtgtgaaaccccaggatgcgtggccagtcccatgcgcctgctgagcacagtccagggccagtgactgtcctcagcacagtggcagatgctagtggtaggaggccgggggcactgggaatatggagggaaggggtgggggtggtgcatcgacattctagaaatataggccgggtgcggtggctcacgcctgtaatcccagcactttgggaaaccgaggcaggaggatcacatgaggtcagaaattcaagaccagtctggccaacatggtgatatcccatctctactaacaatacaaaaattagctgagtggcgcgcacctgtaattcaggcgacttgagagcctgaggcaggagaatcgcttcaatctgggaggcagaggttgtagcgagccgaggtggcgccactgcactccagcctgggtgacagcgtgagactccatctccaaaacaaaaacaaaaacaaaagaaaaaagaaaaaaaatacgcctggcggaagttagtgcttcataaaggctggcttctgctattattatttcacattggaagggcctccagaaatggtcacacctgatttgtgtattttcatcaacagagggaaactgaggtccagggaggaggtcttacccaaggccacgtgacatgcattggtggcagcgctggtcctgcactctgggagattcctccggggcatccttgggtgtttgcctgtttagcatgagtttatgggacagtccctctgtcctaggcaccccacgcactgtgtctcatcaaatcctcaccaggcggtgtgcaatagaaatcacaatccccatttcacagatgagaaaaccgaggcccaggaagggcagaagaatggccacggccacacatgttagggagtggcaaagctgcagtttgagccctccacacaggtgtttaactctagcacacatggcctttcacgagcattgaaactgataaaggggagttgcgggaagctcggtagtttcagagacaaatacattttgttgagtggaacaaatgttctggctataaccaagctgcaaagctgttggaaaagcacaggtcaggaatggacacggcttccagggaagccagggctcagagcaggttcaacagatggaggggtcgcggcccccagagctggggagcccacttgagaaagggttgagggagcagtggggactgcagagagaggctcctggattgagggtgagatgaccagggagctgggcacacccgccaccagtccgcccgctgcccatctgcctgctgactgccatctgcccactggcctgctgggtgacagaggtcaggagttcgagaccagcttggagctgaaccctggaagacacgccacccccgtgcagtgggacaaagatttgggcatggattcgctcagtgacttctggagggaagaggcagtcgccttcctttacttcctccagatcagtcttcgagctccggcacatggggagatcacgttggctgttaatggggtgtctcttttgtgttttcacagctgcagacactgggaaaccagggcgaggcttgcatccactgcactaatgttgcttttgtggtcacttggcttgatagtgtttctcaggctctgtctcctgggtcaggctgggtccttggcaatctctgcctgtccccttcagtaggtttgaaaaaccaagcctggagggatgcggtggtgatagactcacctttttggtctgggaacaggaacgagagatgctttcgtctgttttgagcagacccaacacaactccccatttccccaaaaccgacacaacaatgcagcataccaacactgtttttgttcttttcaacacctcattttgacgcaagagcttctcacacaccttggaaggggcttcagcccagatgaggggttttcattagcgttggagaggttgggggcctcagacaaatccatcctccaaggcagtgtattctgacgccgcagctgggctctgaaatggcttagaattttaggttttcagctaaatggtgaccagggcggtcagtgtgtggccaaactcattggaggagaagcggtcagttctgccctcttggggcctgtggctaggtgggaggtgagatggtctcagggaaaggcatgagagacctgcagtagcaaaacctccccccacaaggggcagcctgccctctgcagctgggtgtgccagaggaggggccagcaccctcagggagggcgggactgaacaagggacctccttgggctgcccagatgttactctccagggcctcaacctagtgtcaggcctgcagcgtggccttgcgtccttgatccttcagattacccatctgtagcaaggagatgatcatgtctcccctgtccactgactgatggaccacctgatatgggcgtctttgtgtttccaatttcttgtccatcctctgctcttgggtgtctaaggtcctgggatctattgtcttgtcaccagtggctcattgactcctgtagcccaggattccacttttgtccctgtatttcaccccccctcatgctctggtcactggtgaccttcacgtccatggacctaataggcttttctgccttcatcttagttgacctcttagccacatgcagcatgaatgtttcctatttgaaatacatgactttcttggcctccacactccacgtcctttcttctgtctttctgcgaagtcattcttgggtagctcttcctccttattctaaatgctagagtttatcatgtttattccttgggcttctttcctgcccctccttctccctgcatgatgctacctaatcctacagctttaaaactcaccttatcagttagcaattgctgcaatattactgtgagataaacttccctgcctctcattgtcagacagcagtgagcatgcatctctggtctgtgcctctgtgggttggctgcagtagctctgctccatgcacctccttctggggccagttacatgggcttgatcttctcatagcatgtattagtcagggttctccagggaaacagaagcaatagtacatacacagtcatgtgccacataatgacatttcggttaatgatgctctgcttatacgatagtgattccataagattataatggagctggagaattccaattgcctagtgttgtaggcattgtaacattatggagcaacgcgtcactccactgttacagtgatgctggtataaacaagcccgtcatattgtacaaaagtctagcacatacaattacatacagtacatagtacttgatactgataataaatgactatgttactggtttacgtgttaacgtacttctaattgttattttagagcctcatctccagagttgagtctgacctcctacctcacaactatcacagagtaaacttgggactcaactctagaggtggggctacttatataaaaaaagtaagtgtcctatacaggtataccattatttacacctgagctgtaaaacagcctcagacaggttctttaggagggattccagaagacagcattgctatcaagggaggcaacagctccatgcgtattactgcccctgaagatcttccagtgggatgagatgtggaggtggaggacattgatgatcctgcccctgtgcaggcctagcctcatgtatgtgtttgtgtctccatttttaaaaaaaagtttaaaaagttaaaagaaaaaagcttataaaaaagatataaaggaaatatttttgtgcagctctataagtgtttgcgttttaagcagtgttattacaaaagagtcaaaaagttaaaaaaataaaaaagttcataaagtaaaaaagttccagcatgctaaggttaatttattactgaagaaagaaaaatattttaaagtaatttagtgaagccaaaatgtgcagtgtttataaagtctacagtcatgccctaggccttcacattcactcaccactcactcactgactcacttagagcagcttccagtcctgcaagctccattcatgatgcgtgccattttttatcctgtgtaccatatttttactgtatcatgtgtatgcttagatacggttttgatatacaagtacttccctttgtgttacaattgcctacagtattcagtacagtaacatgttgtgcaggtttgtagccttggagtaatagtctacaccatacagcctaggtgtgtagtaggctgtaccatctaggtttgtgtaagttcactctgacagttgtgagatagtaggtgggactcaactctggaggtggggcttagacattggacctaattgagaactagttaaaacagggacggagtggaagcacctttccataagacatgcccattcgtgtgccatattggtttaccattgccatggcaacacctggaagttaccaccccttttctagggatttctgcatacgctgtctctaaatttgcacgtgattgaaagtggatataaatctgactgcagacctgccctggatctgactgcag[450 bp omitted]gcacaggaaaatatggtgtcccagctcaaagagagggagagcaaatttgcatcagatgaggaccatccacattggagatggtggtcatcttcactcggtctgctgattcaaacgctcaactctccaagaagcatccacagacacacccagaaagaaggttccaccagctacgtggacatcccttagctcaggcaaggtgacacataaaattaaccatcacaaagaaaatgctggagctcaagagaacaagatgatccaagcttctgcttctgctgtgtctgctactgcctcactggtctgctttgggttgaccccagagtcaggggagaggaagtttgcttggcccactgagagctgggacaaggatgtggatggatggttccattacaggagagtgaggggctgagataaataatttggtctccccagcacatctgtgccagcaactcccaaatatgtttctaggccaggctgtgaccttcagactcactccacacctcccttgacttctacacttgactctcctgaaggctacaggggatgattactcagtgcatctggtcttcccttgaagactcagtttccctgtttgtcatgtgagcaggttgattagatgagctactagttctgagagcaagtgtgggacttagggtcctgcatcgcctgcgtcactctagactttcttttggctttatgcccccttgggatttacctgatggttgagaacatgaacatttagccaatgacccatatggggagatggaagaagcttctgttgacccctcccaggtctgtgagcctggctctccacaagttctctggttccttgtgcagaaggttagctgggccatgctgagtgagtggatgaggttggtgtcctagttcacttgtgttgctataaaggaatacctgagactgggtaatttataaagaaaagaggttgatttggctcatggttctgcaggccatacaagcatggtgccagcatctgcttggcttctggtgagacctcagggagcttttactcatagcagaaggcaaagggggagctggcatgtcacatgacgagagatggagcaagagagagaaggcggagaggggccatactcttttaaacaatcagattgcggatgaacacagagtgagaactcactcattaccccagggtggacagcaccaagctattcatgaaggatctccccgcatgacccaaaagcctcccaccaggccccacctccaacattgggatcaaatttcaacatgagatttggaggggacaaacacccaaacagtatcagatgactttgccattcaggctgttcatggaatgagggaccctcacgatggccacgaatctgtctcctagctcaggctctgagttcagagagacaggactgaacttggaggctctaagctcagaaagtaggatctgtggggccacactttgggcaatgtctggccctgcagttccaccgctaccaaggtgatcaattcttctgcagtcattcttgtagaggcaggtgtggcctggggacatcgcgtcccaggcaggccgccctctgtcctgaaacaggcttcccggagccctgcgcaccccaaacaaaagctgcctctgactcctcagcctttgtgcacatctgcattattagcaatgctaataccattctgcaatgataaataattaaacaattatggtcatgaatcaataagtttagcacattttttcatcagcaaattgcactgtataaacaagaaatataaattaccaagtctaatttccccctaaaattataagcattttatatctaataattaaaaaagtgttagaattcaattttggatagttagaactttaaagaattttcagtttccaccaaacaccattaaattgtcatgttttatgtctctgaatctgattaacattttgagatctggcctcagaaatctttctttgttagctcccagagacgctccacccaggctccagcttctcaccatcctcacagacggcgaatccactgggctccggcttccaagggtctggatctgcgggttccactggagagcgaggatttataggaatttttgattgaaagcacaggtgacaaacccaaggcttgtgggctctgcacaccctccacagtcttttgtgtggcctgttggcagtttgatttttacgtttttgggggatgttgtttgctttgtctttaagtttagatgtccgggttttgttgaggaaaaagaaacccacaccagatttacagtcccctagatcccccatctcattctgtgcagcagctgccccgtctcaatggagcatgtatggtccaggtggctgcagtctccaccactccccacagtgtcttgctgtggctgaggccaccaacaattgtctcagaaggccacatgctctttttctgaccttggccccggtctcttttgcaatccccgatttagtggttagaatttgatgaccccccgaccccccactcagtggctcacacctgtaatcccggcactttgggaagccaaggctggtggatcacctgaggtcaggagtttgagaccagccaggccaacatggtgaaacctcgtctctactaaaaatacaaaaattagccgggcgtggtggcacacgtctgtaattctagctactcaggagtctgaggtgggagaatcacttaaacccaggaggcagaggttgcagtgagcccagattgcaccactgcagtccagcctgggagaaagagcaagacttcgtctcaaaaaaagaaaaaaaaaaaaaaagaaattgatgctctaagcatgtaagataaagttcacaaaggcccagaatcccagcatgttttacaggggggaacactgagtataagatgggtagtggttagagagtcaaggtcacccccaggccagctcccttccaaatgctgccaactgcttgttgctgccgtcccacccacctccagcccgagtagcctctcaccttccctggtgttcctgctgcctctggagaaccagacctctccgctccagcccctctccttccctcccttctcccaggctcccagagcagtgtcccagcctccaaaatgctctctttcttggcttgacctgtccgctaccaaaagatgaaactcaaccaagagaacatcaaggaacgccagcttcctacctccactcttcatggctagctgcatcggtcccaatcacgtggtgggggcaagtaataggatattccatccattagtggctcatccacggctcctgcaatgccttccaccctcgtgaagggcgccaccaggtacccagggggccagccgggtgctaggggtcattctggcagttccctccctttccctcacctgacaaccccccactcacctggcccccctgcctccccttcctcagtcctgtagattccagctctctcccaccctgtatcccctccacacaccctctccacagccccagctgcactgctttttccagcctcttaacttctttgaaaaaacattttcagcacagctgaagaagggaggttctaaattgagaatctgatgaggtacccctggccccagtttaaaatagtcaatgatcccgcttcctcaggaccaagtccattctccttactgctttacagtgtaggtgtgctggaggcagtgctgagaagtccacacaaggtagttcatgaatagggagaatgagcctcaggataaggcatccgtgtgtcggaagtgaaggctggaggccatgcagggtggtggcctttttgctgggctctctcggcctttgttctggtgaatccctctcaccttctgtttctcccaggtccacctcatccttcctgaccaagttcttcacctctcctgaggagccttccctccctaccccagggcctgtaagtgattccctccatcccctctgtgtccatgcagctctgtgtggtggggatggaccctggtgacatcctggtccccacagagctctgtgtggtggggacatatcctggtgacaccaggacccgtccccacagagctctacatggtggggacgggtcctcatgacacccctgtgtccatggagctctgtgtggtggggatgggccctggtgacatcgtggtccccacagaagctctgtgtggtggggatgggccctgcggacacccctgtatccatggagctctgtgtggtggggacgggtcctggtgacactcctgtgtccatggagctctgtgtggtggggacgggtcctggtgacactcctgtgtccatggagctctgtgtgttggggacgggacctagtgacactcctgtgtccatggaactctgtgtggtggggacaggtcctggtgacaccgctgtgttcattgagctctgtatggtggggacgggtcctggtgacacccctgtgttcatggagctctgtatggtggggatgggtcctcgtgacactcctgcgtccatggagctctgtgttgtggccatggccatgggttctggtcactctgtggtactgggagactcagcagccactgtgccttttggactctggatctccagtcctgtgggacagcaagcccaatgcccaggtgaacagaccccaggccccggaagcagtacactcacccacggaagcatgtggagtgcagacgggggcagaactctcactcccaccatgcccggtggactgggatgcacagacatggtccctggtaggccccagccctccctcccctcagggctgacctgtccgccatgtgcctggccacacctttcttgaacctggggatattttcagctctgccactgccctgggtgatgcacagttcctcgtttttccaggtcctcctcgaaactctgactctggagtaaggtttggtggacagagctctgttgcctcctcaggcccattgtgagttaggatctgttttcttgcctgccatcttccagagttgggctgggcacacaatgcgggctcagaagggatcctgtgcttgaaacatgaagggcatcacgcaggatgactgagactgaaactaacgaggtgactgacaagtacacagatgtgttaatatttcaccatggccagagtccagccagagggccggtgctgagatgcactgttcctggggcccttccagggccggtctgggtctctgtggaatgtgcgggctcaggaatcattgttcctggggctgttgtcacagtgtgtcaatgatattcattgaagaacatctctttgaatgagctaagaatgcttaaagagaacagtagccggccgggcgtggtggctcacgtctgtaatcccaacactttgggaggctgaggtgggcagatcacatgaggttgagagtttgagaccagcctgaccaacgtgaagaaaccccgcctctactaaaaatacaacattagctgggtgtggtgtggtgcttgcctgtaatcccagctactcgggaggctgaggcaggagaatcacttgaacccaggacacggaggttgtagtgagccaaggttgcgccactacactccagtctgggcaacaagagcgaaactctgtctcaaaaaaaaaaaaaaaaaaaaaaaagaggacagtagccatcggttaaagacatgcacctcttggttgaaacagactgatcagtcccagaaaatccctgctaagcagtcagctgccgaaagcacctgcctggggcctggaccctcgccaaatgtcaacatgatgttggggaccaacaggaacactggaagcacagtgttgaggagactggacatggagattgcctcaagctgggtttctcttggaatgcagagcctgaggtcaggcctgagggcgtatagcttactggggacatcatcccagttgatgggggccgagggaggtgggcagaattgtctaaggagtcatataaaatgcagctctcaagtgtccatctggagaaacaaagtggggactcatttacccattggtgccgtccccctaggtcgaggtgacccccgagggcatggattcctctccatactcaggttgcccacatgtgctctgcaagagatctgggcatgggctgggtgagtgggtgagagggtctctcactgcccctggcccacgaggggtatccactgcagggggatgcggggtgatagtccatggagggtgagaagcagtgctgcttctgcctgctcaggggctcaggtgattttggaggagacgagacattccaggcagagaggtcatgcccacacgtcgtggctgtgtcagcgtctctgagatcagccccattccaaggtcccaggtggacgcggacacctgggagctggggcagcctttgaagatgtgcagcgtggagggcgcagccaggggctgagtggcctccgctcagtgtcgcccctgcagcagggctggccttttcaccttgctgccgtccctgcctccatttgcctccattcgtgggtggaagttatcagggccatgggtgccaacgccaggatgctggggcttccagattttgtttcactcggtggctcttagcaacatgtttcttgcattctgctcattctgtttcacatttcacacttccccaggctgagcgagccatccatctagtgcaaacgcttctgacagggctggggtggaggacgccctgctggccccagcaaggggaaggaagggggcttgctgggtgggtgtgggtggcgcatgctggtcaggacagcctggggtcgatgtccctgcacccccgccccccgcctccttccctgtcttgcagagccctcttggagctggcgattgctctgaacagaccttcctcctcttttcattccagtctctctgatcacctggggagatacagaccttgcaccttctccctcacagcccagacaccaccggaatcacctcacacaccacctgaatcaccaaacatctccaaacagccctcagacttttactctgcaggggcaatttttttaaaaaaaatttctcttcaaccttctcaaagcctctagtcagccacttagagaagaactctccaaatttcctatctctccctctatatttatattgatttacatttaaaattatttttgcacagggttttccttgattttctttctttggcaattacagattaatctgaacccctagatttttgagtatgtatctatgtctctatttatctatctatattttattttaaatctgtaataatattcagaattagctcacaaaactggattacacaaagccagcaggtttaaaaatatttcaaagatgttgcttttatgcttcaaatccttgaaaagccaaatacattcacttctgaaactaagtcttgggttttgctgaaaaaaaaaataagaaaagtgtttaatagcacatatggcataattttatttgacatctgttttgtaacaaacaatatttagctcacttatttgctgaatgatacagtacacagtgcaaacaaaaagtccaatgaacagtttttccagagtttgtaatatatcaatatttattgcaaaagaatgcaaaacttaaacatttaagtgtgttattgattgtaatatgcaaaacattgattactgtatgttgccactgcaaaaaaaaaagtgtactaaatgccttctggggtatgaaaatgaggtgcatttcagcaagaggagctcacttgctccctttggtgacatttagtcttaggcctgccccccttcccccgtttgtgtcatcctattgaagacagctgtcaatatatttaggatgctttagctcatagcagcaaaaatggtgagactattggcttaattgtgaggagtgattgattttaatggaaacaacatttaaaaactcagaatgcactttctgttggcagtgctaatagaatcctctaatgaattgaagcttcacacataaatgcatggtacttactgcaacaattagcaaaggacaacaatggttgatgcattaaatttttttaactcaaaagttgaaataaattatttgtttacataatgggaccacgggaaccaaggcagaagcagaactggctatcacctgatacacaaagcacacaccaacaaaactgtggtcaagtgaagccacgagcaggaccctggtgttgttttctgtccttgccattattatcggaaaaataatatcagaaacaatatttaaacagatcctccttcaggttgttgggcagagggaaatggcgaggactccctgtcctgttgaggttctgtgtggtgggcgcatttttccttgggttgacatcagtacaatgacaaatgcagccaggaggggtgagctcaactggagggtcctgagggattgcctggagcacactcagaagcccccaaaacaaggcttggaaactgccccccaaccccagaacaggaaagttacagatttaattagatttttcaaaagaatcataatcatgaaagtaaaataaacagcagacatttactaagcatctcatgttccaaaccccacgtaagagatttcatgcctctcctcaggcatccctgaccttgacccctgaaaagcaacctgcaggttcagagggcacttatttggacctgcactggggctctaagcgcttggaggaagccatgacttgtgtcttccattttgcaatagttctcattagcgcttggtgcccactgtgtgcctggatccccaccgggtcgggggtggagtgagggcagagatggagagaccaagctcctgccctctagtgtgctgaagacgagggcttccaggaacccaaatttgtgtatggggcagtataggctcagaaaacagctttgagaggttcagaagggaagaggaggatgaccttgagcgtgtgatggttctcagggcccaacaacttcccctttataggggcatcctctcagagctgagagaccagaactgcagacagcctgggcatcccctggttcttaagctccccctataatttccccaccagtcccctcggcctctggctgaactgatggattctcagtctaactggctgcctctacccggggtggccttcatcacccttactcttaacttctccaaacctcagtcctcacgtttttcaaaggaaggttaaaggagggcccggtgtggaggttcacgcctgtaatcccagagctttgggaggtcaaggtgggagggtcatttgagcccagaagttcaagaccagcctgagtaacataactagaccccatctctacagaacataaaacaattagccgggcctgatggtgcatgcctgtagtctcagctacttgggaggttgaggtcgaagcatcacttgagcccaggagtttgaggctgcagtgagctgtgattgtgccactacactccagcttgggggacagagccagatcccgtctttaaaaattaaaaaaggaaggttagaggataaaggagataatatgtggaaaggactagacagtacctagcacagagtaagcgctcagaaaataccagtttttgtttgtatgcttcttattcattgttagtgctctaggcttctgtgagaacttgactactgcataatctctctgagactcaacttccttactgtaaaatcgagaaagcactgcattttattcttcagagggctactggggttattagaccgagatgattcgtggagagtggcctgccctgtgcccgatacagaacaaacactcagatgttaggtgacagtaacaagaataatgtcaatatcttcagaaacaaagaactaaccctggctgtgaaagggtttgtgctttggggtctgtccttgcagagacggtagatgggagacccaaggagacactagcatcctcttttgcagaaggttctagcagatgttgtggttgcaacaattggcatcagtgacttggagctgaaacctggcttgtggggtgctaggggagatctaggggcagcctaactcacctacccgcttcctcctccgtcctccgcagcagtgagaaacgatccgggaaacagaaagcagaggcgaacaatatatgtcacgaggaaataagaacactgcaccactagaataaataataatattttttccctggctttaatgaaactctatagatataaaaagctggagaaagggattttttttttacagaccttaattatagcagggttgttagtaaatttactgaattgcaaatgtaaaatattctgatggcctgagtaaaaccacatatttaagccttctaaatgaacatttctgttttttgagtaatttgtaccatctgtgtcaaaattctgagtctaaaaaaaaagcagtggaacaaatgttggttccataaaacagtcctagttcattgttgaaattgtcacacattaacattgcaggccatctgggaagacaaaagcctctaaccagattgcggagatgattttattggtctggtattaatcaggatatggcataatatttaagcagaaaggagagatgaggtgaagtggggcccttcatccaccccaactgcgcgcgagttgtaccagagccccctccactagggcgtggggcattttaaagccggtttcatcatcagaaaatgtaaataaaagccaaggtaatatttccggtttgaacagaggcacacaaaacacagaaacttcatgggttaggcggctggctcgggggagggagagctcttgttcagcggggtctacccagaaccacgccgaaatgaggtggagtggagcttccctttatcaccgcgcatctgaccctgagcgtgagagtcctcatgcccaggacggtcccctgctgctcaccgtccccgcgggtgcacagtgtcgaggccagcctggcctgcggcaagactcaccacagccagggttcagccctgacagctccaacccctgcaccttgggtccccttcctcttttgcactgaggctgagggccctgggccacagcagatcccagccttggtcccgctggatcctggcaagtgcccaggtgcagctcccatcagctcaggggttggtggcttggtggaggcaactcttgaggcaggtcactttaggattcacctctgagtgacaggggggttagaggtcacagtttagattatgtgcgtcttcctccggccactccacttgggcacacgcccctgggtgagtgggctggtagtcaaggatctgacattcgcccgatgggtcccactttctatgtacctctcagatctccgcgcggatcatctcacagcgcagagagatgcctgggcttaaggacgtatttttcatacaacttgcccctaaatgcaagccatcaatttcatcaagtgcttaatggaaggaacatggtctgccccaaatgctggcttgtgttgaacccactgaggggagggaggtcggcgtcctgggtgatggcttcctgagagactttcaagggaacttctgactttgtgctaacttgtacacactgtaccctcctgtgctgtgtggccctgtgtgattggggactcaggcggaggtgtccagggtgctgctgggagtgcgtctcctgggtccgctgcggggtggagagctgcagcggccaggtctgccctgccagccttaggccttcctgccaggagaagatgccaccccttctgggcagctttcaaggctgggggaacgcggtgctccctgtggaactgccttcatacttggttctttatctttgtccatctggaggttatgcacaaataaatgccttatgcagactgatggccttcacctttgctccaaatgctggcatatgtagagtctcttctcagcatctcctgcatgctgagccctgttgcagagggaagggagagccctggccacagggcgttgagtccagttttcaggaaaaacttaccggaaacagtgaaggacgtcacaatgggaaatgcaagttgctgggtccccagagctcagataatgagcatgagaactgtgggatgcattaagagggacctcctaaaaataagaacctgaaggccgggcacggcagctcacgcctgtcattccagcactttgggaggccgaaggcaggcagattgcttgagctcaggagtttgagacgagcctaggcaacatagtgaaaccccaactctacaaaaaatagaaaaaaattatccaggcatggtggcatgcacctgtggtcccatctacttgggaggctgaggcaggaggattgtttgagcccaggaggttgaggctgcagtgagccaagatggcacctctgcactccagtctgggtgacaaagtgagatcctgtcaaaaaaaaaaaaaaaaaaagaaaagaaaagaaaaggaaacatgagaccttgtctctaataaataaataaataaggctctatctctgaaaaaaaaagaaagaaatcaacagcccatctcttaaaacagcagcaacaaaatggacacagatcacacttctctgctatataaaaccctttagtggctcccacttgccccggaaagagaggccagagtccctgagaggcccttgccccctgggcttccatgggaggggccttccctgctcctccacaccgcagggccattgcccctgctgtgctgtctgcctggaagccccttgatcaccagccgggtcagcccggccaatctcttttcttctttcaataccaacacaggcagagcttctttaaggatttgttcctctggtctcatagcaccttccactcctcccttgctgctcgtaacactgttttaattaagtggtttatgatgtaattattgtttgtgccttcatgtctgaacacaaggagatcaactattttcccaatgaaaagatgagaacttttttggtgggggtcttgtttgtatatagaaactcataaggacgaagtcaaaatagtccaatgcttctttataatagttattaactatgttgcaatgcatacttgaaatcactttttttgagctagggctttattctgtcacccaggctggagtgcagtggtgcaatggtagctgactgcagcctcgacctcctgggctcaagtgaacctcctgccttggcctcccaaagtcctgggattacaggcatgagccactgtgccctgccccgaaatcaatttttttttaaaaaaattttctttccataggttattggggaacaggtggtgtttggttacatgagtaagttgtttagtggtgatttgtgagattttggtgcacccatgtccggagcagtgtacactgcacacaatttgtagtcttttatccctcacccccttcccatccttttcccctgagtccctgaagtccattgtgtcattcttatgcctttgcatcctcatagcttagtttccacttacgagtgagaacataggatgtttggttttctgttcctgaggtacttcacttagagtaatagtctccaatctcatccaggtcgctgtgaatgccattaattcattcctttttatggctgtgtagtattccatcatatatgtatactacagtttctttatctactcattgattgatgggcatttgggctggttccacatttttgcaattgcgaattgcgctgctataaacatgtgcgtgcaagtatcttttttgtataatgacttcttttcctctgagtagatacccagtggtaagattgctggatcaaatatccagtatctacaacgaactcaaacaaattagcaagaaaaaacaaatgattcaatcaaaaagtgggctaaggacatgaacagagaattctcaaaagaagatatacaaatggccagcaaaacatatgaaaaaatgctcaacattactaatgatcagggaaatgcagatcaagaccacaatgcaataccaccttactcctgcaagaatggccatagtctaaaaataaaaaaaaaaatagatctcagcatcgatgtggtgatcagggaacgcttctgcagtgctggtgggaatgtcaactagtacaatcactatggaaaacagtgtggagattccttaaagaactaaaagtagaactaccatttgaaatcactttttatgcaaggaagtacactcactgggaatgcttttttattctcccatgccaggaataaattgcactaaaattttcacacagtgccccctccactttcactgccttggctctcgggggagctgttttctcaggctcctgccttcagtggtatggattcatttgaatccctaaagatgctttggctcatgcctgtaattccagcactttgggaggctgaggcgggcaaatcgcctgaggccgggagttcaagatcagcctggccaacatgctgaaaccctgtctctactaaaaatacaaaaattagctgggcgtggtggtgtgcaactgtaatcccggctacttgggaggctgaggcaggagaatcacttgaacccaggaggcagtggttgcagtgagctgagatcgcgccactgcactccagcctccagaaatgcatccaaagctgtgagctccatttgggatccatattctccataaaataaccacttgacttattttcctatgtgacccttaaaagactgctttcctgtgacacctcgcagctgcagttttgagaccacaccccctccccaggaataggtatttttgttctgtttattttctttccccgtttttttttttttaacctattccatcaggtgacctctataagcatccaacattagcactgacggcggggcttgtaggatgaataggtctcttcctttaagttcaggctgaacggaattgggagcagagccctgcggtaggacagagacttcgcaaagcccggagcacacagcagcaccccgtcttctaaaggacaattttgggaaaactcttgcctaatattctggcactaaggatcattctgtcacatccccgctctggactacaagcctgcaagccccatccggggcagggctcctcattcctgtgcaccgtggaagccctgtgcctgcccagggcctggcacttgtacgtacttgaaaacctcgtgtggagtaaagagaggggtgatgtgcaaaggccttgaagtggggaagggtagttgaggtggctctggactcagcatggtgacaaacggagtggggaggggatggtccttcatgaagcagagtgaggaggcactgtcacacatgcatacacacacacacagagacatccacacagatacacacagacacagacagacacacagacacagacacagacacacagacatatagacacatagacacacagacacacacggacacatatatagacacacagacatgtacagacacacatacagacacacagacacacacatatagacagacacacacagacacagacacatacacagacacaccgacacacacagacatatagacacagagacacacacagacacacacacacagacatgcacagacacacatatagacacacagacacacacatatagacacacagacacacacacagacacatacagacattcacagacacacagacacacacacagacacacagacacacgcagacacacacagacacaggcacacacaggcacagacacacaggcacacagacacacagacacacagacacacacacagacacacacagacacacaggcacacacacgcacagacacacagacacacacacagacacacatatagacacacacacagacacacagacacacacacagagacacagacacacagatacaaacagacacacacccccacacacacagacacagacacacacacaaacacacatatagacacacagacacacaggcacacacacaaacacagacacatagacacacacacagacacacacagacacagacacacagatacaaacagacacacacacacagacacagacacacacacacagacacagactcacagatacaaacagacacacacccacacatacagacacagacacacacacagacacacacatggatacacatagacacacaaagatacagacatgcacagagacagacacacatacacacacacacacagacacacacacacacacacacagacacacacacacacagacagacagacagacacacacacatgagagctccagaggaaaagtgatcccaggccaaacagaagcctctggaagctggagcaggggttctgggattgtacccctgcctgtggccacagcccttgctgggcttgcccagtgataagcgcggaccaggagctcttctgagaagcccctcctggcgagacgttgttgtgagcctgctaatgtcttccacttaagcagcagccaccgaggtgtgccgcttcctggtgcctaatggcccggggtgtcgccgagcactattaatcccgctggccattaattccgggaaatgctcagggtcattacaggctgtgtggcttccaatgagaagtaactctgcaaggtgagcgcccaggccaccggccccaggaatggcctcctgcagggaggcctggtaaccagggcaggagggggtgcctggcctttgcacgtgtgtgtgtgtatgtgtgtgtgtggcggggggaagggggtagcaggcatgcacccaacatcaggggaccacatcaaaatggggagacagagatgtgcagcaagggctgttctctgcaaggacccagagagtcatcccctaagtgctgccttgaagcagcacgtggcttggatgtgggggtgctggggcaaaaccggaaggaaggatttttgctgctgcgagtggagggccggggacagggagaaatattggagaagggttctaggtagccttggtgtgatcttcaaagtgttaggtagagagtgctcagtttcccactctggtgaaagacaaggaggcacagaagggctgcagcagtgccaggcagagccgcaggctcgggctatgggtcaggacaggcagcagttccgccaacagcggagggtcttgtgcttttgcagggcagccactgcgtctcactctgttcctgctgtcccgctggcccagccactggctctcaacctggatggcctctgctgtcccgtgacctctgctgccccatggcctctgctgttccatggcttctgctctttcatggcctctgctgccccatggcctctgctgtcccgtggcctctgccatcccgtggccaccactgtcctgtggcctctgctgccccgtggcctctgctgtcccgtggcctctgctgttccgtggcctctgctgttctgtggcctctgctgccctggggcctccactgtttggtggcctctgctggcctgaggattctgctacctggtggcctctccttattgtgttttctctttataatatgagatctggaatcaggcctcccggtttcaagccttggcgctcctgtttcctagctgggtggccccgggcaaccgactgacctcctctgagcttcagttacattacccataaaatgagaaaaacaacagagcgttatgaggattaaagatgacaacaagtagatcatttgggaccagcctcgaacacagcaaaagctctgtaaatgcttcctcctcctcctcctcctcctcctccacttttcctctcttctgattttattgtttctgttattctctctgtgtgtcttctggcctcgatccctgactgtgaggctcatgggtgtcctgtcactgcctccgcagaggggctgggctgggccattatgcactttccagaaatgaacgtccctgttgaccagagtggcctgtcctcgggccatcgctggccacttgcggcaagttctctttggaagaaaagccaacctccagtttggtgaaagtgtcagcgttttggggtgcagagcatgtgaccctaatgtaagccagcacccctggtccctgccttgggagcactgtggtcctggcgcaaaccagagcacaagtccagttctgtcccctccagggtccctccctattcactgcctcagtgaccaccacatgggcagagcttgcagtttagccagcactgtcccagttcacctcaagtctgagaggtcggcctggccaaaattcaaatccccactttcctgatgcagaacggactgccagagctggattttcaacacagggccgccaagactggggccagctcccgtcccactgtgccacaccgtgtttgtgcgtttgtgaccccgtgaaaggcagaaccggctgctgtcgtgtgggtggatggagatttgggacaaggacacagacacagtcggcagagagtttgaccccagatggaggaatcgggtttggctaaatttctctggaatccttcaatgagtctggcttgctgctatctttaatttcgaagaccctgctgagggctggccccaccaggacgtggtgctcggggacagcagcccccagggtcctgaggcagcttttcctctacctggaccccgtttctttctgggctcagtggtgcatctcagccaggactctgctcaggctgactttcccgaagcccagagagcagggagcggtggcccccaccatgagtgggctggcagtgggtgtcacatgggggcggaagagagggaagtctgggaaataatgcccagccccacccactgaaggaccgggatgcagagaaatgtcactgctgctacacaaaagtgcggcattatcagccccttgcaaaggcaagtggattaaaatgccattaacacagcaaattaagcttacagtgaagtaaacaggaattaaatcaataaccagcacaggggacagctgaatttttccaaatggtcccccggggattggggctagtgggtgcatagggtagggggcagggtctggctggagaggggagggggtaagtgacatgcttagagattgaaggtccgggcactggcaatgggtacttggagggttcaggctgagacctgtccctccagtggggagcagcttcgcttcctgtttccacccaggtggctccccctgtttcaccagctgtccatacttctgaaagtgatgccagatagatgtcacctgcttggcatccccccactcttcctttgtcaatcgcacctagattcttcttcggggacactccatgcccccaaaatctcttagtctgtcctgttcagttagacccactctttggccgcaggctgtcccttgcccaggcttatagcacaagagaattgtgtccctatggtcacagcatttgatttggggatgttcagccaatccacatctgtgccaagaggcaacccaaggactttgactggagccttctaaaatgtcctgaggggctgctaagctgatgggatctggcattctattgcaccaggagagcttgggctgggagtgggctgagaggtaaggaggtagaggctggatttgagtgcctggatccagctgtgcctgaagctatgctggattttcccctgcattctattttttttttttttttttgagataaggtcttgctcttttacccaggctagagtgcagtggtgcaatcacagctcactgtagcctcaaactccctggcccaagcaattctcccacctcagcttcccaaagtgctgggattacaggagtgagccaccgtgcccgatctctccctgcattcttcaggaatctgaacctctctgtctcccatacttttattcttaagctagtttaaatcagaatgtggtcatttgcaactgaaagagtctagcttgaaaaataattttatttctttttttttaaaaagaaaattaatttatcaaacatctcttagggaccattgagcatggtggtgtcccttggtctcccttgcctgtcttttgcagtctggatgctgtttcctcatctaccctatggggttattgtgttatgccctaccagcctgtgtggctgtccctcctcaggccacccatacatgcatccatctatccattgacccatccaccaattcatccatccatccacccatccatccatctacccacccacctatccatcatccactcatccatccatccatttatctatcatccatccatctatccatcagttcatccatccagccacccattcatccatctacccatccatctacctgcactcccgccctcctcaggtgtacatacccatccatccatccatccatcatccatccacctacccatccatccatcatctacccatccatctattaatccatccatccatcattcatccatcctttaatccatccattcatttatccatctacctattcctccacccacccatccacccatccattcatccatccacccattcatctatacatccatccatccactcatccatccatccactcatccatccatccatccactcatccatccatcccccatcaatccattcatccatccatctatccatcccccatccatttctccatccattcattcatccgtccacctaatggagccctcctctggggcaggtgggctctatgctgggctatctcagcccactacctttcaagcctctgatttaatacatcttaggcaaaagaagaatctttaatgggggacacacggatgggttcttattccttttcctttcaggtctcttattcacctgccttaccgcagagctcctggagaaggggtaagacccaggactgagaacgggatgactttttctcctggcagctcctaccgagatccaagccacctccatctggaagcctttcatgactgtcctcacatctgggaaggcacctgccctctctgtgcgtctggggccccagggtcttcctttgtcaggctgctctgtgactgacacttcccgattctgccccctctctgttttgtgagctccttggaggtagggatcgaagcttttccctccctctgggctccagcacggagctcagggtgttgtgcagagcaggcctcaatatgggcctgctgagtaaatgaatgaatgacacccagtcgcagatgcttttcttgaggctctgattataggttctgacctgcgcttggggcactttttaggggccatggcttccctgtggggatctctgccccaccatccccactctctccacctacccccccttgtttcctcttttctaaagagactccttggccctgccttgtccagggcaagttcccacggtttcaggcagtggagtgggctgccttgaggaactgtgttttggggattgggtggcggtcagggtggagggtgcaggggactccccagaccaaggtggcatgatcaggacacgcttttcactttgcttggttattggttttccagagatgcttctaggaacacttcacacagatggagggaggccattacaagggtgattgttactgttcttactttttgggggaatggtgggggtgaagcatgcaactgccttgcacctcataggcaaggggttcgcttgctaaaatacccttctatttccctagcttggctccaactgtctggtctgtggccaccagggtctctggaggcctgacacccccagtctggacacctcgaagtgaaggggagaccaggggccgcccccaccccaactgccccacggacgcgatccctggccaggtcagggagggaaaaagaaaacgggtccaactctgaagagttctgcattcctctgttgatttttcccctctccctccctcaggttccaaatccaattctagctcctggccaactggtagaattaagggattaagagctacccaggtcttatcccgatatgaaaagatttcaccgagaggctcatagttcagcatccaaagccgaggaaatcgctctccgcctgccctggtattgttttgcaagcctcgctggaaccaccttttgagctcctggctgaggcatcgctgtttcacttatctcttaagacctcactcataattgctcaatgtccgacaagcagagagaaccctgggcattatctgttaagggccctctaatccagttcataaggacagagtgtaatcaggacacctcaaaatctttctaaagtcaacgcagaatgtcacatgagccctgagctgcttcctggcgaaccccggggaccaacacagatgccagccctccccacctcaccgcgggagggcacatggggcttgaaggcttgtgtgggcccagagcgagtgccggttggccagagagaccagaccaacttatgggggaaaaagactttgtattaaaaagcagaagggaatttttagcatgtgccagagttggtatgtaacttcatatgtgtgtgtgtgcatgtgtgtgtacataggtgtgcgtgcatggactttctggacaaaattaaaatgagtgagccctctccaggctctcatgagtccactgggtcagcttaggcagcaaagggcccccacagccctgggcacagggctgtatagctggtggcccccgacaggcaaggtggcagaggtgtggatgagtcagaggctgagtttctgcaggcccacgggaagctcgctgacaaatgctgttaatcttcggcagggcaggggcacctccagcacggagctccatatgggcgcacctagatctatcagtcgactgtcgactgccgcccttcatgggacacgggcgcgtccctctgactgatggagcctttctgggggctcacggagactctgggcaggtgcaagctcagatgccagaatcccctggcacctctcatcggttcatccacctacaactgacaaatggagctcccttccccactgcacaacagggaaggatggctttaaaacagcccgcaggactaagctgggtgtcttcttcctgtctagggcctcacctggccagatcacactctttccacttctctgatgtgagccagccagtgtggtggctgcaaccctcttctgccctccggacatgtggctccaccccacccatctctctggatgcctgagctcctgagtctgggctctgacagccactttccacccgctgatggctcccctctgtggctgcgtgctcagagtgtgccgacgcatcctgggattcctgcatagaaaataagaaagggctggtgtgtgtgttgacgtcttggtttgggtcccccagaagctgacctcaagacgaggatcccgtgaaagtcattgatttgggaggcaaccacagtaagtgtggtggggaggggaagtgagaagagaggagaaagccaccaagcatggcacaggatccacaggcaccagcatgcaccgagctcccctccagcgggggtgtggggaggcgccattgcacctgccacagggtgttccccaggaagggaagaaagctggcaggaatgctgccagttcctgggtgagggttacccccaagatattagttacctggcccttctggctttgaaggccaggaatttccaagatcctggagaagttctcagggacagaggcatagaacctctgcctctggccttgggaaagtgcaggtacatgccagctgctgaggtctgagagatgtgggcagggaagagccagcgttggctctgatggctttcctaggtcacatttcctgggcaggttggttagggagatgggacaatgtgtatatgagtggcaccaaggctggattctgctggccagctttcagctcttcctgtgcaaatttctggaggcctggccctcttgctgcctggttaggaccctctttccaaggcaaacacagtccccaccctctgatctagatgactgaccatcagccaagggcagttgcagttttggtgcaggccaagacaggcactgaggtgtgaccttgagccagtgacatccatctcagagccttgctctctccacctgaaaaacgggcaccttgcagataagcaaggggtagcccagaataatccacagtattggagatgaattcgggacattggtgtgcacttctgcttagcctaatataaatacagatggatgcacgtaaaggtattttagatatgtctatatacaggggttagtgtacacacatctgcttcctggctctgtccaccgagagggcctagaaacaacgacatcccagtaataacacctaccacccgggccttggtttctaataccatcctcaaaaccaggagccagaattcgttgaagaaacagcccattctaggattgggacaggaaatgtcagataagcctgaagcatattacagtgccaaaaagtagagtgtgcacacacacacacatatacacaaatacacatatacacatacataagcatacacatacacacacacatagacacacacacatacacatatacacaaacacacacacatacacatagacacacatagacacaaacatacacacacatacccatacacacacatacaaacacacatgcaatggtggggcttgtcaaagagatgtagggatcaatgtaagagcccccagtggccaaaatcagaataattcgagcaagaaaaatgtagtattgcattacaacccaaagtacaggccgggtgtggtggctcatgcctgtaatcccagcactttgggaggctgaggcaggcagatcacctgaggtcaggagtctgagaccagcctggccaacatggtaaaaccccgtctctactaaaaatacaaaaaattagccaggtgtggtggtgggcacctgtaatcccagctacttaggaggttgaggcaggagaatcacttgaatccgggaggcggaggttgcagtgagcagagatcgcaccattgcactccagcctgggcaacaagagcaaaactctgtctcaaaaaaaagtacaaaatatatatccatgaatccatactgatataggtaagtagttgaataaataaataggtgggtgagaatagacacatcccgtgcagaagaattccacgtaattgacgtagatgcccctccctcgaggaggcggatgatcatcccagctcttaagtgtgggctgcacccagtgaccaccttcccagtggtacgctatggaaacagggttgagaaagaggagcttgaccctggagaaacctgagcccaaccaggcgaggaaagtcaggggcaagtcctcctgagagtgggatgtggggagaacggtccttatcccctgtggcctttctcccaagaacccatcagctcagtctaactgtgagaaaagtagcagacagccccaacttgagggacattttacaaaatatctggcctatgttcgtcagatctgtcaagggcattaaaaacaaggcaagtaggagaaatagttgcagtctagaagatcctaaggagacgtgagttctaaaagccacggggtgtcctggatagggtcatggaacagaaacagtacattaggtacaaaccagggaaatccgaataaagtgtggacttccgttaataatgatgtaaggaacattggcgcctgatttgtggcagatgtaccagagcaatgtaaaatcctaacaatgtgggaactctactatcttcacaacttttctgtaaatctaaaactattctaaaattaaaactttgttatggctgggtgctgtgtcttatgcctgtaatcccagcactttgggaggctgaggcagacagatcacttgaggtcaggagttagacaccagcttgagcaacatagtgagatgccatctctacaaaaaatttaaatattagccaagcatagtggcacacacctgtagttccagctactcaagaggctgaggtgggaggatcgcttgagcccagaaagttgaggctgcagtgagccatgattgcaccactgcactccatcttgagcaacagaatgagaccctgtctctaaaaaaaagtttatcttaaaaatggggcacctctcctggaaggcagctcagccattatgaaaggaccctgacctggcatcaggggatttgtattcttgtcactaagtgactcttccccgctgggcctcaatgtcttcatctgccaaatggcagggttgaatttccacgtctgatcttggctgtctgtgatttccttcacacctggcttgagttgctggggaaaacttttaaagaagaggggcacagctgagggcatcttttgcagagcgggtggctgaggcgcatcgtggctggacctgagtccatctgccctggtgcctgcatgactggcccttctccttcacagaccatggccccaggctcccttgctttcatttcccagcccgttattggggcaggagagtagcaagcgggggagttttgatgaggcgaggaagcagtgatgtgttttaatgcactgtttcctggggacctagaatgaaaattttaacaactcagaagctgtgcactgaaggcgcccctgctgcaggttctcagaagggtattccaactaaattgcagaaatataaatatgcatcttcctcgcttttgatgagctatcactgcgcagagcccgaatccccaagtggcaaggtgtttttccactcaatgggagaacagccatcttcggttggcctggctgtagtgctcctcagctgtgtttgcactttgtggccataaggccatgcgcttcccaggacctgccgagagctgaccttctgtaccaagctgggagacagcccaggaaagagaaaaggcaaaaaattattttaaaaacaatacacagaggctgggggcagaggctcctgcctgtaatcccggtgctttgggagtcccaggcaggaggctcacttgaggccaagagttcaagaccagcctgggcaaccatagtgaaattgtatctctacaaaaaatttaaaaacttagccaggcgtggtggtgcatgcctgtggtcccagctactcaggaggctgaggtgggaggatcgcttgagcccagtagttcaaggctgcagtgagctatatacagtgagctgcagtgccactgtattccagcctgggggacagagagagaccctatctcaaatttttttgttttttatgttttttgtttttagactgagtctcactctgtctcccaggctggagtgcagtggcacgatctcagctcactgcagcctacgctttccaggttcaagtgattctcctgcctcagcctccaagtagctgggactacaggcaagttttaccacgcccagctaatttttgtattttttttttttagtggagacagggtttcactatgttggccaggctggtcttgaactcctgacctcaggtgacccacccacctcagcctcccaaagtgctgggattacaggcttgagccatcacacctggcctcaaaaattttttttataagtaaaaaataaagataaaaaatgaaaaacaatgcatgaagatgcccggcagaaaaaatagggttttacaggataagtcattacagtgctatccatccacagggcctacacacaccagctaactcttaagcttgggcaaatccttccagagaatgcaggggggaaaactgtttccgtaaaaccttcagcatcagagccaggcacaatgtggaggagacccaatccagggctctatgggatgtatacctttccctctccaccaaggctgtgaagtccaggccctgtgcccctaagtgggtcgggcccaggatctctggagtctggacattccacccaccgtcccctcatggagctgcatttctccggccttgggcctgagcctggtttcacagccttcttcagatacctgcggagacacttccaagacagcaccgtggtggtgtttaatgaatggcaaacactctctcacaaacagaaagaaaaaaaaaaaacctccacaaatccccaaacctgttagctggaaaatattccaagatcaacacattttaattcactaattaatacagctaaaaggcatttttcatattagacttattaaaatcacttgtatttaagtgtttttgaactcatattttccgatgctgtgcgttttcctaaagtgttctagtcatgttatgcaaatgcctatttaaattaccaggggtatttgttgtctatttctactctgtaaaacataattttaatacaagttatttgtgaaatgcacattggaaaaaagaaaataagatttgagatggcatttctatgataattttattgcaaatgttgaccatgtttttgtatttgtctgcaagaggtaatgcaaaatatacataagacatatttccgggatttattgttatatgtgactaaattagtaaagcaaaatttgcttcattgtttgaacccgaggcagggcagtccgtcaccttgtgaagcatgttttagacgaacagtcacggccacgcagcaggcggaacccctgccatcccagaaagaaaatttgctcttgctctccactgaaacacgattttctgatacctgtgtgctgccaggcatgatgtttgaggcataaacccagacctttgccgaggacagggagactcggcttgagcaagacaggagtgctgaacggaagacataacgggggttctctggagtgataaggtggcaatgtggtggccagacttcagggcacagggagtcctgggaggggcttcttgaagggtctttctttgtctacttatcagaaatatgtagccttcctactaccagcgtttttgatacacatgtgatacaggcataataagatggctagaagcaaaagatgaaattgagagagggaaccctggcagaaatgctatttctgagcttcctggcagccaaggtgaaaaaggaaacataatgagtttaatgacactaagtctcccagcactttgggaggccgaggcgggcggatcacgaggtcaggagatcgagaccatcccggctaaaacggtgaaaccccgtctctactaaaaatacaaaaaaattagccgggcgtagtggcgggcgcctgtagtcccagctacttgggaggctgaggcaggagaatggcgtgaacccaggaggcggagcttgcagtgagccgagatcccgccactgcactccagcctgggcgacagagcgagactccgtctcaaaaaaaaaaaaaaaaaaaaaaaaaaaaaaaattacactaagtcattgtccaggtaaaaaatgtctaccttttgggaagagggatagtttccccctagtcttctagtctgagtgaaatccaagaaggcccttcataagggaaaacaaggacacagcaagctctgttcccagcggtggtgagcttacacaggctgcagaaatgtcctgaagggctgggcacggtggctcacgcctgtaatcccagcactttgggaggccaaggcaggtggatcacttgaggtcaggatttcaagaccagtggaggctgcagtgagctgagatcatgccactgcactccaaccttggtgacagagactctgtatcaaacaaacaaacaaacaaaatcctgaaggaagatggttgaattgaaaccaaaggtatggtcagtcacaggttttaaagattttcctgcggtgttgttggggggacctgtgacggaatgagactctgtctccaacaccccaaccccagtcctacaaggacagtcactctcacctgtgtcgacaggacagacactgagattttcccaagggggagaggccaccatccccagtgcgggctggcggtaggagcactgtagagcctgtgtcctagtggggacagcattctcttgagtgcttattccttttaggtgccagtggttaggggttataaaaagtgtggaaacacaaactctgctacctgttacctacctgttagctgggacagcccttccatcgatatctgtggaatgagaacttggtttgctctagagaaaggggcttcccaacatcgcctgaacatacacagcaagctcttgttcacaatagactcaattcaattcccttcctttccctttccttcctccctctcctcctccctccctcctcctatccctcccccttccttctccctttcctcccccttcccttctctttctttcccttcccttcctccctctccttctccctccctccctgctcctatccctcctccttccttctccctttcttcccccttcccttccattcccttccttcctctcctcctccctccctctctcctcctccctccctctctcctcctccctccctctctcctcctccctccctctctcctccttttcctcccccttccctccccctttcttttcatccgccttcccttcccttcctccctctcctcctccctgtctcctcctttccttttcccttcccctcccccctcactcccttcccttcccttcctccctctcctcctccctgtctcctcctttccttttcccttcccctcccccctcactcccttcccttcccttcctccctctcctcctccctctttccccttccccctccccttctcccttccccttccccttccccttccccttcccttcccttgacaaggtcttactctgtcacccaggctggagtgcagtggtgtaatcatagctcactaaagcctcaacctcctgagctcaagtgattctcccatgtcagcctcctgagtagctgggactatacgaatgtgccaccatgctggctaatttttaaaatttttttgtgagagacaggttctccctatgttgcccaggctggtctcgagctccaggcctcaagcaatcctcctgccttggcctcttaaagtgctggtattacaggcatgagtcaccacgcccagcctccatataggtttctggaagggaactgacaatggagactgctggtgcgggtgggccaagccgtgggccagtctggatttacagaagctgtgtggttgtgggccaggccttcactgctctcagtctgtccctcataaggtgaggacgaaccctaccatgcagagacataaagatgacaaaacacttgcaaagtacctagcccggtgcctgcccgggcagctggtgctgatggggcacccatgaagaccatgatgcccagatgacagtaagggtggcctgtgggtgccacttaacttccaaagcacttcatgagccagatctcattaaagccatgttgcaattctgtaaggttaggtatagctatcaccacccccatttcacaggaggaattggctcagagaggttcagtgacttaccaaggaacgcacagcatgtcaagagtgagcctgggatgcagagcaggtcttccaggtctcaccgggcagcactttaatcctctcccttcactctagaaagctgggtggacctttgggctgggttcaccatcttcaagaaggaggcagcttcggaggctggcatgggtccaggactgcatgtccagccctttggaagtgtcaaatctggacaagaggtgggacaaggcctcggagccagggactgaccacgggcttggaggtcatgttctatcttccctgttgcttcccctcctccttgtaccaacagggccggctaattaggcaaggcctgtggctccatatttaacaaggaaggtggagggaccctggctgtgtgtccccccctgactttgtgtgccccacaccacccaaacctggtcaatgagcaacgcctgccccaggccctggagcccgcaggcttagtttcctagagtctccgctgttgcactgggttctatcactcaaaagggcactctggatgggcctattcagaggccattgtctggccagcaaagctgagcatgtggctggagggcattagcccccctggtggccacatagggagacccaaacaaaaggcctggactgggaagtgcagaggccgtgacagcaattctaatttttgaggccttttgaagcatcggtgcgctcggagagcctcttccctgtatcattcttacgtggatcaacagatgttttaaaacagagctcctgatgcaggggaatcctggcaggctgcctcgctgccctgagagggggctctgcagatgacctcaggtaggcgtttgctgagcgccaccatcctggcaaggtgcacagctctcatgatctgctggggagggtctccctcctgggccaggcctcactgaggaccagcccacaggtctccgttcctttcctccccttctgagctgctgtcctggcctctgagctggtctctcagtagcaggaggagccgacagaggcaagggcctgtttccctgcaggtgctgtgtgccttcaacacgcagaggctctgagggccgggtctgcagacacccacaagggagtcagccaaggccactgaagtccactcagaaaaaaccgctgctctccacagggtgacttggctttcagtctccagatgtttactgagcaccttctctggaccaggctctggactgggctcaaggtcctggagggaccgagacagatgtggacctgatcttgggtttcagcggctggaggtgaagacaaacactcaatgttacaaatgctaagttaatcatcacagcttgcaaagtgtgtcaaaggggagacagttggccatggctcatgcctgtaatcctagcactttgggaagccaacatgggtggattgcttgcggtcagaagttcgagaccagcctggccaacatggtgaaaccccatctctactaaaaatacaaaaattagctgagtgtggtggcgcatgcctgtaatccaagctacttgggaggctgaggcaagagagtcccttcaacccaggaggcagagtttgcagtgattgtgccactgcactccagcctgggcgacagggtgaaactccgtcttagaaaaaaaaaaaaaacagtctagtggagccctcccctagaaatcaagcctgaaagaagactgtggggcacccatctgcctacctgacagctgtttagtaagctcctactgtatgccaggcactgagtgaggggctcggtgtgcacagcgaaccaagcctgacaagatcatcgttccgctggagtgtatggtagcgtccagggtgcagagaggtatgctgggaacagcaaagagataccttcatttaggggagtggtgaacagtgggatgaaagaaataaaataggcaatgtagtggggtgctgtgggtgtggggagggcctcctacagctgagggaggcaggaaggtctctttgcagaggtcatatgggagcagcagcttgaatgaagtgagcagggagctggggagagggagagtgcccccatggaggaaatggcaaatgcaaaggccctgtggcaggcaggaaccaggcaggttgaaggagaacaaggagcccagagcgcctggagcatgtggcagggacaggccgtgaggggaggtggaagagatgcacatggaccatgaggctctgcaaggccagagggggccatctgaattctgcttctcatgcaatgcagagccactgaaggggttaagagaagagtgacatgatttgcgttgtgttaaaagtaaatcccagctgtctcagaggctcacacctataatcccagcactttagggggcagaggcaggaggatcgcttgagctcaggagttcaagaccagctgggcaacatagtgagaacccatctctacaaaaaatgtaaaaattagtcaagcatggtgacacactcctgtagtcccacctactcaggagactgaggtgggaggatcacttgagcccaggagttagaggctgcagtgagctatgattgcaccagtgcactacagcctgggtgatggagcaagaccccagctctaacagaaaagaataataaataaataaacaaatccctctggctgctgtgtgcggaaggatttacagaggcagcccagctcagggataatggtggctaaggctcgagtggacacagggcaggcgggatttgaggtgcacctgggagccagcactgcctggacttgctggcaggttgtgagggaggagtagtaggaaggggagagcagcgggatctctgggtttgtggcttgagtaactcacccagagagcccacagtcggagccgtctgccatcaccagtcaatgtggagggagcaagatctgagtggaggccacctgtgcacacggtgtggggaggccccgtagtcctgggagccggtaggaggctgtttgcttgtagcagagccggggaaggtctcacggagtggggagatctgagctgtccttgaagaatgagtagatgttgggctgtgaggaaagatgaagggatggtgggaaggcagctgaggggaagatggaagtggtgtgggtttgggtgggttgtctgtctggcagggagtttatggagcaacatggggctgatagaaatggcccaggttttgtgtcacggcctcaaatgcctggataaggaggccagatttcgagtgcaggtgtgagtaattccggcagaccagaagggagagcaaagtgacaagtccaggtcaagctgagaattcccaggacatggctctgtctaagcattgggccttcccctttctggacccagtcatgagaggcctacgaagtgggccactccccttccatctggagatggtggattctagagcaggggaaggctgtggagctgtctatgtccttcttaccctgtcctgcacgtcctgcacaatctggtcctgtgagtgcttctccctcatctccagtcctctcccatccctctgcgagctccaggcacactgactttttgctgtttcgcaaactcaacatgctcctttgcgccccagggactttccacatgttcctccctctgccagaaagcttcccctccactccttcccttggctgattgcttcgcgtcattcaggtctctgctcaaatggctcctcctccaagaagcctccctgacttacagctccaagcccttacccattccgtcctcatttcgtcttctttctggcacatatcacagactgagaccgtgttgtttgtttacttgcatcattgtatatctactgcctctgccccaatcagaatggaagtctcatagccttgagaatttgatcatcttggttactgctgtgtccccaagactggaagatttccctgcacaaagtgagtacccgtcagtatttgctgaatgaataaatgttttggggccccaccttgacaattgggtgaacagaccaagcccccacccgcaacccccaggagatctggcaggcccagggcagtcccccaggaccccagacctcctgaccccagtcctgcgctctgccgggaggtttgctgctctgccctccctgggggtttcagcagcaggaaggccaggggtgttctgggtttggtttttgtaattggttggatatgatcatgaaaagcatctaacaattggacagctggaaatgtttttcctcccatttattacttaaaacagccttggagtttctggttgtttttaaaatcagattctcctcacttaaaaaaagaaataaaaaaattaaaaaaaataccatgaacccactcttacatatttttgaagagaccctgcaaggtcatgacaaggcctctgtttgggggagttggaaggggggcttctccatgctccagagaaggcctgggagcgtccagagctgggtctcggccatcccgcagttgtagtatcaggaggggaagataaattaagatgagtgcattgcacagttagacattagccatgacagtgaaaaagtattgtgaatgttaaaacggcccagactaaaatataccgaggttaaaatacagggtaactttacaaatcactaataatttctttggctttcactgcaataacattgatttaattcattagattcctttctaaatctatatttcagttttagagttgtcagtttctgttaatgacaattttgccccatctgttccaacatgaaaatgaggctccttgcagcagacaagatagatctctaagagtttaagaaggagaaatcttaaaggtatttcactcagatgaggccctatttgatgattcacactccaaatgaagctgcccacagaaaacttttcctggacgccagtagagagatgaccccctcccccagtgactcccaagcattcctgtgcctgtggctaccccagtatcaaatgggcccctgtgtcatcttcgtctcatatgtggaggggaaatattcaaaacattctcactcgttcttttttttttttttaatgacagagtaataattcagggtgtcagcatatcagaattccagtggctgtgattagaatgacaatgagttgctgtgatctggccatttgaatcgtcatattacagtaagtcatttccgtaaggcctggtgagcttctgtctgctgaggggccaaaactcagtctgggttttcagctctggaagaaatgtctctgatattcccctccagtctgccagcctctatatctgtaagctacctgcaggagatagttttgtttcatgtggcttcttttttgagactgagtctcactctgtcacccaggctggagtgcagtggtgtgatctcgactcactgcaacctctgcctcccaggttcaagtgattcttctgcctcagcctcctgagtagctgggattacaggcacccatcaccatgcccggctaatttttgtgtttttagtagagacagggtttcaccatgttggccaggctggtcttgaactcctgacctcaattgatccacccacctctgcctcccaaagtgctgggatgacaagcatgagccaccgctccaggccaacaggagattgttttgaaaacatgggtgaagactgtgtgcccaaatccaccggcattggaggggtcagtgtgggcttggcacaagcccccatcaggaacgaatgggaatttaagagcacctggattttctgaagagcaggagaagccctgcccgtccagctgttcgggaggtgctctggagtctgcagcagggtcttgtgttattgggggaggacattccactccttgtcagctgtgaaaaaaatgaacccacccacgaaagaagacacagcgcatagttcatgacccaaggaagaggggatttctttaaacattcgaaaaccttctagaaaaatatgcaggcattaaaacatacatggaattaggccggatcctcaaagttaatattcaccacatgtatttacattcaactcaacgccagcaaattgagtactgcattacagcttggagaaagaggagattgcctctcacacaggctgacattaagttgagttactgttctgccgtagacttctccaggaagtcaaaaagacagttgagagaatcaggctgaaaatcctcctggtacatctacctcctaatttcaaatacaaattagtgaaattttaacatttcagatgtcataccttgagcaaattaaaaatcaacaaaaatattaaggttctatgttacctgctcaaatgtacagaatgtataaaaactttaatcaaacactcgggtttgctcagttttaaattgtgttagtttaatagtttcttttctgctgtttatattaatgacatattcccatctaaatatattgccatgctgaaaaaccatcacaacatttccaaggttgaatgaatgcagttgccttcatggttttttaataaaaagatctctttctattaagttccccctcttttttttttcttgttctccaaagactgaggagctctgcagtgtgtacagtagcattgggactgagataaatacacattgccaccacctcatttagtgtgcaaatgcctcctctgcagctgtgcagagctgaggaaccaccatttcctccaatagcccagctgaggacgaagccgcggaggggctagtggcaacacaaattgctttttctaagcatcgactgaaggtctcatcacttgggaaaatgtcttaatttgctcttcttagcaaagtggttgtatgcactctcgactctgttggaggaacctcgccctgtctagatacatctagaaggatgtgcacataggcatacatgcagggtagatgccaggccaggagaacccaccagcagtcgactggaggatctccaagtcccatcacaggcatggggtttaacaccttctccccagcacccacctggctatacttcccatgctgcccctctgattggagtctggtcctcagctctgaaaggcacaggtaatacagcctactgtgctccaatcggtctccaatttggcaaaaccaaagttaaactttccagttttacaaaattgagcaattcttagagttcagagcaggggaggaaaagtaaatcacaggtaacccaaaggttatttgaagataaattccctaggagccaggatactttgaatttgcctgcttctgggcttggggcagaggactccagctgtctggctgggctactcacaactaataaataggtgagctgtgcaagatggcatctgaggagttcccatgatgcaggactgtcctccatgggaaatagccgactcttttaatacaaggcaagctcaattcaatcacaagtgcattataactctaagcacaaataaatgtattattcctacatttcgttatgatgtaaagcgagtcctatgaatctaatcacttacaagttctgatcaaaataacaaccgttcatctgtctaccttttcttcaaagttatttttgagcttatcgaccattatagactatctcaatcacacagaccaaaatagataatgtaataaacacatacatgtttaaaacacccagttttatcaaaccttagcacaatgtcgtatctgccccagatttttttcaggaactgagacgttaccgcagcagtgtgccctggtgtccctcttgcccagggaccagcatcttcatcatagggagtttttaagtgctggtggcagcttgcggggagaggctgattgacctagaaaagggggtgctacttggcagtatcatcttcaacttctttcgtcctcatccccaggaagggaaagaaggaaggttccaaatgaaggacacacatttgacccgaaggcccagcaagaattgcatgttgcaatgtgcactgtgatctgcaggcgagagaaatgaggtgattaaagctaaaaatgaatatgcccgacctgggaaactagccttctgaaataattaggccatgagacgcaggatgagggagcgagattcaggtgtctgttgaaaaagagagagactctttccccccctcgtgtgccttttccaaatggctgaaaagtacctcagttgtctcctggaattcgttttagcagcaattcatttctgaccacgcaggacttgggattcaagatgtgtttttctaagccagttgtgatgagatccggggctttgctaatcaactagaaatatgactggatatgaaatctttacctgtttaagaaaattatatattttgagcaaattaattccatctggacagttacagcccataatcagctatgttatgcaaatagtatctttgtggttgaaatcaataacttattttcttctgtaataaagaaaaaagggggaataagttagtattaattatgtacaaaatgaaatattttcttgcaaggttgcgggtttcatttcattatgaaggctttccttgtgccagtttctaggatgctgatgagacccgtgcttcaggatgacatccctaaggccacctcttgttggggagaaggttcagggagccgggcctgggcatgcttctctggggaagcccgtccagcaatgccaggcgatgtctgccagcaccccctggcttgggctttttcctcgggctgtggttctgaggatcaccttatttataaagcttgctgggccacagttagtatcagcttcagttatagatgaagttaatgacagtattgattatgccataacctatgttaatagtgagtgtattacctcttagccatcgggccgtatttatgggctgtttcttcccttccaatcatggctgactcctgcaggaatatcatactttttttttttttttttttgagacagagtttctctctttttttttgagacggagttttctctctttttttttgagatgggtgactccagtcacccagactggagtgcaatggtgcaatctcggctcactgcaatctctgcctcccaagttcaagcgattctcctgcctcagcctcctgagtagcagagattacaggtgcccatcaccatgtccagctaatttttttgtatttttagtagagatggggtttcactgtgttgaccagcctggtctcaaactcttgacctcaagtgatccatccacctttgcctcccaaagtgctgggattacaggcgtgagccatcacgcctggcagaaaatcactctactctttcttctggtcaaaaggagtgtatcttttgttttttttttttttttttttttttttttaatgtttttttttttattatactctaagttttagggtacatgtgcacattgtgcaggttagttacatatgtatacatgtgccatgctggtgcgctgcacccactaacgtgtcatctagcattaggtatatctcccaatgctatccctcccccctcccccgaccccaccacagtccccagagtgtgatattccccttcctgtgtccatgtgatctcattgttcaattcccacctatgagtgagaatatgcggtgtttggttttttgttcttgcgatagtttactgagaatgatggtttccaatttcatccatgtccctacaaaggacatgaactcatcattttttatggctgcatagtattccatggtgtatatgtgccacattttcttaatccagtctatcattgttggacatttgggttggttccaagtctttgctattgtgaatagtgccgcaataaacatacgtgtgcatgtgtctttatagcagcatgatttatagtcctttgggtatatacccagtaatgggatggctgggtcaaatggtatttctagttctagatccctgaggaatcgccacactgacttccacaatggttgaactagtttacagtcccaccaacagtgtaaaagtgttcctatttctccacatcctctccagcacctgttgtttcctgactttttaatgattgccattctaactggtgtgagatgatatctcatagtggttttgatttgcatttctctgatggccagtgatgatgagcatttcttcatgtgttttttggctgcataaatgtcttcttttgagaagtgtctgttcatgtccttcgcccactttttgatggggttgtttgtttttttcttgtaaatttgtttgagttcattgtagattctggatattagccctttgtcagatgagtaggttgcgaaaattttctcccatgttgtaggttgcctgttcactctgatggtagtttcttttgctgtgcagaagctctttagtttaattagatcccatttgtcaattttggcttttgttgccattgcttttggtgttttggacatgaagtccttgcccacgcctatgtcctgaatggtaatgcctaggttttcttctagggtttttatggttttaggtctaacgtttaaatctttaatccatcttgaattgatttttgtataaggtgtaaggaagggatccagtttcagctttctacatatggctagccagttttcccagcaccatttattaaatagggaatcctttccccattgcttgtttttctcaggtttgtcaaagatcagatagttgtagatatgcggcattatttctgagggctctgttctgttccattgatctatatctctgttttggtaccagtaccatgctgttttggttactgtagccttgtagtatagtttgaagtcaggtagtgtgatgcctccagctttgttcttttggcttaggattgacttggcgatgcgggctctttgttttatgcaaataaactagaaaatctagaagaaatggatacattcctcgacacatacactctcccaagactaaaccaggaagaagttgaatctctgaatagaccaataacaggctctgaaattgtggcaataatcaatagtttaccaaccaaaaagagtccaggaccagatggattcacagccgaattctaccagaggtacaaggagcaactggtaccattccttctgaaactattccaatcaatagaaaaagagggaatcctccctaactcattttatgaggccagcgtcattctgataccaaagcctggcagagacacaaccaaaaaagagaattttagaccaatatccttgatgaacattgatgcaaaaatcctcaataaaatactggcaaaccgaatccagcagcacatcaaaaagcttatccaccatgatcaagtgggcttcatccctgggatgcaaggctggttcaatatacgcaaatcaataaatgtaatccagcatataaacagagccaaagacaaaaaccacatgattatctcaatagatgcagaaaaagcctttgacaaaattcaacaacccttcatgctaaaaactctcaataaattaggtattgatgggacgtatttcagaataataagagctatctatgacaaacccacagccaatatcatactgaatgggcaaaaactggaagcattccctttgaaaactggcacaagacagggatgccctctctcaccgctcctattcaacatagtgttggaagttctggccagggcaatcaggcaggagaaggaaataaagggtattcaattaggaaaagaggaagtcaaattgtccctgtttgcagacgacatgattgtttatctagaaaaccccattgtctcagcccaaaatctccttaagctgataagcaacttcagcaaagtctcaggatacaaaatcaatgtacaaaaatcacaagcattcttatacaccaacaacagacaaacagagagccaaatcatgagtgaactcccattcacaattgcttcaaagagaataaaatacctaggaatccaacttacaagggatgtgaaggacctcttcaaggataactacaaaccactgctcaaggaaataaaagaggacacaaacaaatggaagaacattccatgctcatgggtaggaagaatcaatatcgtgaaaatggccatactgcccaaggtaatttacagattcaatgccatccccatcaagctaccaatgactttcttcacagaattggaaaaaactactttaaaggagtgtatcttttgtgaccatcagagtctaatgcagaaacagcagtcgtgtaacactccatttcagctgggaatgcttgcattggtttgacactcacagcagtcattatcacctttacttttcccttcagatgggaccctatatttggaggccccatggagagagaaccccaggaacccttgctcgaccttcccagatggccaggttggggacctcctccagccaggtcacactccaggtgtttttctaaatgttgggatgaaatctcttagggtgtgttatcccaggatctgctcttgtcaaagctggtggattttcaacctggagcgagcagtcacagtaacttaaatgtggaaatctgtcagagcgtccatggggctgtggcgcgattggttttggcctcctgccatttcatttacgaggtacttgtatttgacaaacagacctcgtttatgcacagatatcagccttcttcctgcctgagcatcaggcacaagactgcgccctgacccgggtcccgcatctgtcacccccgtggagaggggccgtttctcccaaacacaagcctgttcttgttcgcctggtaaaggggttctgaagcgagggtgttgtggagtctttgagtgtcacacagaaaaatgtccccactcctgcagggcttcagtgcaaggtcactgtgggcagactcaggttctcagaggacccaggagaagtaggtagcgggcagtcccaagttcaactgtgctgcttgagggtatggcctgcaggaggagggttggggctagcttatggggtgacagaggcagccatctaggagaggggggcatggctgacatgctcagggcttcccagggtccctgaatttagaggtctcttcctcccttgccttctggtgcttggctcagggacacccccgtcctccacctgggaagcacgcggggctctccactagcctgggcatgggacgggagggctcattaaccatcctcccttcctccatcccggcctgtttatggattcctgactgagtccgccaggcggcttgaagcggttgtggacagctgggccgcttggcattttatggtgagtggcggcttcccaaggccgtaactgtgtatgcctgtgcgtgagcgcccagggacgtgccttcccccgccaggcccttctgaggggtgccctcgccgggggtgccaccaccctggctggcaagagcagggacagaagggtgggcaaagcaggcagggactgggcggccggcagaggctccatccagaggagaagccccctcatcccatcccaccctagactgatgctttcatcataatgacgcctcctggggagacaccttattgctcttcacagaaacaatctctactgagagaaattaattgttttgttgttgatgggaaaagaaatagaagcagctatttttaagtgttctctctagctgggggtgttggaatcgcaagtcacaggtggctgtctcaagaacccataccctgatagggtagtggaccccatggggtacagctgccctggagtgggtaccttctgcctgggattagttggggggctcctgatggcttgaggcgaggctgcctcattctgggcacacagctgggattaagtcccagctccgtcactaactgtgtgatccctgtacctctgtttcctgatggggacagtgatatgttttcttaccggatgttctgaaaattaaatgagataatatgtgctcagtgtttagctgggaacaaagtaggtgcccagcaactggctaacagtaggagctggatgcacgagaggttttagcagtgggttggcgccggacttttctgtgggtaaggtctaattggcccctgcccttccgtgacccttgctgtgctggtgctgtgcctattaacccaaccagggtgtgagccttgagtcggtcagtcttgaggctctgagcagcctccatacatcggttgtggagtgaggatccatcttcaccctttgatatgctctggccccaccttgagctcaatcagtgcgggtgaccctgagctccccgtcacaccaagcacggcaccaaacccacttctggagctgctccataaacagcgaccccccacacacaggcgcatcctaatgggggccccggcagcatatttactatttacggagcatctgggagataacaacttttatgggagggattttaattagtgctgtggctaaatgcggtggagttaacatgggtggaattggctggtgcgctgacttctgtgagaggcatctggcggagggacgtggccgtatttatcacctggtccctgccactaaagggggtgggagtggagatagtgctgagaatcccagggaagtcaaggccaccaccagggcagccagggcagccagggcggggcaggggctgggcagggcccgctctgtggccgggagctctgtgtcgtcacacagggccatgtacttggcttcatgctgtgctcttgtcattttgaaatgtttaataatttaatctttgagcttctgcttggtgagtgaggtccgatggggcaccggggcattgcaccagcaggggaggtgtgccacaccgtgccatcccctttgcaccatggtgacccatgagcaccacattctggcggactcaccgtgcacgggcattcagcgagactcgatgcgaaggcaaggcaagcacgtgacatccagtactacgtgaggtgctgacagcccccagggggccatgacttgcctttgtttatattttatttttaatttgtttaatttttaacttttgtgggtacatagtaggtgtatatatgtatggggtaatgagatgttctgatatagacatgcaatgtgaaatagcacaccatgaagaatggggtatccatccctcaaacatttatccgttgagttgcaagcaacaggatttccctttgaaacacagcttgcttcgaatgcagagggaaggcactggtaccctaagaaacacaagcaaccatagtaggtgtatatgtttatgaggtacacgagatgtttgggtacagacgtgcaatgtgaaatagcaaagcatgaagagtgtggtatccatccctcaagcatttatccgttgagttgcaaataacatgatttcactttgaaccagagcttacttcaaacacagagagaagacactggtaccctaagaaacacaagcgaccaggaaacccaaccatatccttcttgccagtgttatgtccctagagtagccgatcccttacactggaaatgatgctatgagaggaagagaaagatggggctccccacagtccttcttcctctcagcccttccttgcccatccacaaactgaaggtagagggtatgggcagagtgtgtgtgcctcaggaagtgaaataaaagcagttgtgttcattctgtgcagccctcccactgttctgaatgaaatacatatgaatgaatgagctagaaaaaagttgtgtaattttggtgattctgctatgagttaaacacttgtatatttgtatttaaaactggcatggcacaatataatgatgaacgtaaaactcatgctaataatgtagagtttttatttttctttattcagaatggcttcaaatagtaagttaaaaacaccatgacaagtctagagaaagactggaagaaaaaataatgctttatattttagcgcctttcccagcatttctcccttgctttttgaacaaggggttcttacttttttttttcttgagacagggtctcactctattacccaggctggagtgcaacggcgtgctctcagctcactgcaacctccatctcctggggttgagagattctcctccctcagccacctgagtagctgggactacaggtatgtgccaccatgcccagataattttttatatttttagtagacacagggttttgccatattgcccagactggtcttgaactcttgagctcatgcagtccacctgccttggcctcccaaagtgctaggattacaggtgtgagccactgcggcccggctggggttcctgcatttttgttcatggtggggtctcatctgtgatgcagctgtccctgggtgtgggactccaaggggctttggcttgaggagctgtgaaagtgtgaatcttgcagtggccaggtgggataggaggttggtagtagaataataatcgcagtcataatagctgtctctgtttgcatttcccgtgagtcaataatcgcagtcataatagctgcctctgtttgcatttcccgtgagtcaggcactgtcctaagcaagtcacatgggttatctcattccctcctgcaaaccccaccaggtactttgtttatgcgcccattggacagatgaatacattcaagtccagagaggttaagtagcacagccaaggaggttctcagagcccagctggagtccatagccagccagccttcttggccaccttgtttctctgccaccctcattttgctcattttaggggatggaaaactgaggctcagaagagcagcccaaaatcatgactcgacagggtaggggcaggcctggaactcagtctccagccctgtggccaccagggctgctcctccctaggccaccctgcctcacccatgctggaagcattttccttcttcctctgaaaaggcaggcgtgtcaccattcgtcacagtgggctccagtattcatgttagtaacccactgagtgactgtctgctccacattccttcttgagtgatggctcaggacctcagcatagctctctagactcccaacgcccaccacacaagggcgccagcattcagaaacacgtatacgcctggacagacgcacccatagctgctcctgcacacagacacacagaaaggcgcaggcacatatgcatacacacacttgtgcacagacaagcaaaaacaggcatgcacaatgacagtgctcggatgcgcagacatgcacagactcgtgtacacacacactcctcagacacacatgtgcaggcctgcacacagacctgtgcacatggatatttatgggcacatgccaagggtacacaggctcacacacgagctttcacacacacatgtgcacacaggcggtcggacatgcccacgtggacacaccacagaattgactcaaggccacttcaacattgccagaagtcccagcaactcagtctcacagaactggaaccatgggtgttggcttgtggggtcaaggggctaagggggtcatcacctaaggtttgttggcacctcttccacatgtccttgcagggatccctgtgctggagggattgaggtaggagagagggaagcatggcagaaaatgatcttggggtcatgtggaaccccaagtaagggtggccaatttgtgggcaaatgtttgttctgtatttaagatacatgtgggcttagaaatcacaaagtgataagtgcctgtgctgcgtgccagctttgtcatccacagtcccctaagaagctccccactgggtggaaggggacacacagttgcaaaatgctggcaggcatgacgtcaccagaaatgcgggtcagaatggagagaatgtggggccagaaggggtcagggaaggcttcctggagggggagggcttggtcagagcacaacaaggctcaccgatgctgttctgggcttttcctttctctacctcccttcataataaccagctcacttggagccaatacacacagggaactcgttatgacaacctctgaggccgtccagggcctttactcctcccactaccctcctctccctgcccaccacctgtaggtaggtctcatttcacctctgtcatccagatttagaaactgaggctaagaacgtctccagtctgaggtctcaggtgggagaaggagtggcaggaccccaatccaggaccatctgctttccaggcctgcctctcagccacctcagttttcccaccgtgtggttggaggcgttgcttgggcccccacctagagaaatgggcgcagagctggctctgcatttgaaaggagtcccaaggccctgccccacacgcgctagctgtgccaccttgacgtgtgggtcctgtgtctggtctcagagccctcgtctgtaaaatgggtgtgagaaatggataaaatgaagcaggcaacgtgccttgcacagggactggcccaggatgcgtgtctagtaagtgtcagtgccaccatcactattgctgtgatcgatcgcctgtcactgctggctcgtccggggttaggacataatcggaaaatgagaattccaagtcggatcaggaggagtggaaggaggaggctgtgactgtgagcccagtgagcacctgattgcaggggtcagattagggcagaggctcactgtgatcctgttggcctcccaaggtcagcctcgcccctatggtgccaggcccattctttcctgctccccgtttccacagctctctaggtgtaacccagccctggctcggagcgacatgggctgtcactgtgtgaccttctgcatgtctcccatcctctctgaataccaggtttgtcctctgtgcaatgagaataacgtccaccttgaggtggtttctggagttcagatgaaagaaagcgtggcagggctttgaaaagggctacactgtatacccctgctatgcaggaggacacggggtgctgaggagggaagtggttatggcgcccctccctgtccctgctcctccccggggtccctgcccctccacatctcaggagagctcagatgctttgccagccccgggagggtggcattctgcacccagtagtttccatggtgaaaatcccagttcctgccattttgcaacccatctgacctaatttatactttatcatttttggcaattttgtgacttgggttggggagtgggcggtgttgagagcactggctctgagtcatcctcattctcctccggctgaaattcaagtcatgatctaccacatgcacacacgtgtgcacatgggcaggcagggaggccgggaggggaaagtggagaagccccaccatggcaggcatttgtttttctttcaatctttatattcttgctgaatatacgtgtggagagagttgtgaatttttatctctgacctttgtaggcacaaaatcatcccattatcatatacctgtcagaagacaggagagaatcagaccgtattctttgccttttatgtatcaaaaaaagaaagagaaagttattagcgtttttccaatccagggattcaaaaaaaccagctacttctcggccaagctccctgaagcagaggttgctctctgctggcctcgtcacctgctcctggcccagcccagccaagcagcaggactcacagctctggcccatcccctatctctgggcttcctcagagagggtgtcctacagtggtcagcatgcccgcgtggggacaggagcagcttctctgaacacatgtccccagtttctcaatgcccctgcagagatggaaccttccaggtgaaagctctctttcccctcagagtgatactaagtagcaatttaaaaacaccatgacaagcccagagaaagagcagaaggcaggagaattctttagtttttattttttagagacagggtctcgccctgtcacccaggctagggtgcagtagcgtgatcacagctcactgcagcctcaaattcctgggctcaagtgatcctcccacttcagcctcccatgtagctgggaccacaggaaatgtgcagccatgcccagctaatttttgtattttttgtagagatgcggtcttgctatgttgcccaggctagtctcgaactcctgggctcaagcgatcctccagccttggcctcccaaagtggtgggattaccagtgtgagccactggacccagctaggaaaatacttatttcagtggctttaatggcatttctcccttgctttttgaacaaggggtcccacgttttcattcttcattgagtctcatctgtgatgcagctgtccctgagtgtgggatcccagtgggctttggctcagggatttgtgaaagtgtggctcttgcaatgggcacgtgggataggagggtggtaatagaataatgatcacagtcataatagctgcctctgttcttgtttcccatgagccaggcactgtcctaagcaagtcatgtgggttatctcatttacaaacctcaccaggcaggttcctttatatgcccatttgacagacgaatacatttacttccagagtggttaaatagcatggctgagaagcagctgagccagtattcagggcctggaatctcaaatttctcatccgtcaagtggacataaaaatgatatttgcttgggaggccgacgtgggtggatcacttgaggtcaggagtttgagaccagcctggccaacacagtgaaacctcgtctctactaaaaatacaaaaaaattagctgggcgtggtggcagccacctgtagtcccagcttctcaggtggctgaggcaggagaatcgcttgaacctgggaggcggaggttgcagtgagccaagattgtgccactgcactccagcctgggtgacagagcaagactccttctcaaaaacaaaaaacaaacaaacaaaaaaacaaaaaatgatattcattttacagaagtgctatgaaaaagggctgaaatatgtttgcacagtgtcaggtacatggttagtgctcagggcgtgtcatcatcgccaacaccctcattattatcactggaatcattactgcggctgctactctggcagcccattcattccttcaggccacacgaaaggagagtgtgctaggtgccaggccctgtcacggcactgaggacagagcaggaacacagcacaagccctccttgtacaggtctgtttgtacaggtctgtctgtgctcgccagggatttacttcagccctggtacatgcccccagctaacgcttccaccttacagagggaagagaaatgttcctgcaagcatccttccagtgcctgccaggcattctcccagcaactctgccttgatccccaaatcccagtccattgctgatcggcctcagactctgtcctgcttggtggggcctctggctgtggtctgccctaggtggcctgggctatccccgggtgggctggggaaggccagaggggactgctgagatgatggacatgttctttgcagagcacgcagcatcagggtctgaatctggagaacctgggagctgggactggcctttagcacactcagacttggcaggtggatagagcaagaggagaaggttctgggaacccagtaaaggctgggggtgaggtagaactctcacctccagaggcacctcctcagaaggtctggggtggccacagtaagtcctgccccctctcatgctgcctgcatctcccctcaatgggatcctgtctttcctgcctcccccataagcatccccagccctgaagtccctgaggcctgcaggctggcacatctctgctcacccaccccagcccaagccctgagacaggactctgcagagccttcatgtggggcagcaatcagcctcatctctgacggatgtactttagcctggaagcctctatgcatcctgtttcacagacaagcatctaacctcaaaaaaggcagggatttgggtgatgctgacgataaagtctaattttacctcaataatgcaagtggctctgtaattccatataattatattaactggaaaagcgaggcccgccttcgatagacaggactcgattatctttgcaggcatggagtatgctctttaattccctttgcccgggaaggtctgccttgcagctttaaatccaaataacgacagcatgctgttggcattcctacgaccacttatttgttgaagcttttacataaataaaaaggggtgctaaattgggagggcatgcccttaaaggtgaagtctacaggtctcagagctgctgcagacgacgggggctgaaggagctgcgggatgtccggggagtttccctaagctgggctttttcatcatctgcctgacattttaactctccttccttctcctctcagttcctctgaaccgtagagcccacatgcaaatacaacagataatgggcggcttgggtaatttagggtgaacagtaagtaaataatgagaaacttgcattttgtaacatctgtcatctttcttaagtttcatttattttacgcctcccccccaattaaaaaaaaaagacccccataaataccgcagcgcctttggtttagagatggtttgaatggggagaacagctcgaatgcactgttttttcctccaagtaaggtactataaaactgtttataaaatgaaactaatgagatttggagcacactgttacctgatattaagctgttttgatgagtgaggcaaattgctgtggttaacaaatgtaaaaccatcacttttattgatacaggtttgtgtatgtgtgaaattaatcaaagcgtgggcgatgatgaacagtttctgtagaattctgtcaaaggttaagagctagttatttttaagaatgacatgaatctagcagagacagtgattgcctaaatgaccattgtaattaccaattacttcttgaagcagagaatatattcacggcgtgcagtcctctaaatacagaaaggcattagcccatttacgtactaatgcacataatttagctcctgaaaagggcagatgggagcacaatgaaagatataatagataccgcctaatatcattccctaagaatattggattcatcaaagatgaatattactttatgtcagattgttttttataaaccagtcaaaatatatttcatctcatttttgcacgcggtatcagggtgacaatagcaacatcacctttgtcatcaaaatctggccagctgtgggactaggcagacagggtgcctgatggggggcgtttcagccaccctttgtaagccggtgtgtaactcacaggcaggataacttccaggcaggggtgattaattttatttcctttggagtcgatgtcagtggaagcaagagagacacaggttctcagacaggaggatgggagcagggaggtctgagtcgacctcctttcggaaaatgcatcatctgaaatgtcttccggaaggcgacctcctccccagccctgggttcctctcctcaggtgttgaaaatccaatatccaggtatatggagaaggaggagggagccctttctgtctgcacactgatcttaatgccatatttggattgatataatgatagcagagatcttgtttcccaatgttgcagaatcaatgtaataacagtaacagaaatattatttagttagtgcagttctgctggcataatgtagtcacgctttcagcaaaatgatggaaaatataaacatttaatcagcccttattcacaaaaaagcctaaaaattaatcatgtttaaattctgtgtcttcgggaagcaattcagatgctaagcaattcagattttttttaatttttatttttcttgccttttttttttttttggatgcgcagtcacagataacctagtgctgctctcaattacagtctccttgggagaggctgaactgcctggcgcctgccaagagatggtgactccaagctgtggatttggtctgcgcccctccgagtgggtttccagcatgcgtctgattctctccttcatgtcaccaatcaagggcaggaggttacacaataccctgttaaaacagccagccacctgctccccgtcctgctgagccaggcagtggggcacgcgggtgtcacagagaacgtcagcgccgcctgaatacctactacgcgccgggccctgtgccaagcgaggactcggccctcctctcaatgtttccccaaggtcatgaccaggattgcttcgtcttgagtcctgagtccctcagaacatatgggggttagaaggagaaaggagagaaaaggaggagcatcagagagggaggatgaaagcggggagaaaagagaaagaggggagaagagtggagtaccagatccaaggtcaagcttcagggccaggtgaccttgagaatcacttcccctttcctggctaggattcctgtaacatgttaactggggatggtgattcctgccaaatggcccacgctggggctgggagaggccccagggagccagtgcaggcaactgggcttcacatgaaacccctgcatggcaggcccctccttctgctctgggcccagctcataacgttctcctttgaggggattgtgtgcctgcccagcaaaaacgggagcttccgtttcattctctgcttgtactgtgtggccttccctgtggggtgttttcttttggtcttctccttagaccagtggttcccaggcaactggggccaactttacacttccatcctctgggacatttggcaatgtctggagacacgtttagttgtcataagtggcaggtgctcctggcatgcagtgggtagaggccaggaatgctgaacatctggcttaaaatgtcggcggtactggagctgagaaatgctcatctggttatgatggcatggccagcaggtgccaggactgtgccctgactttgctcatcattcgtcccccagcacccagcacacctccacctggtacacagcagtcagggaataaataacagttgaatgaatgagggaatggggttcagagggtgctggcagggctcctattgggtgagaagtcggtctcctgcctgccttgagactccctggaagggacctggacctgctggtctctcttgagccaagcccatctctctgttcccagccacataatgggctcctaacattcagtgggctcccagcaccccagcagcctcaacttgctggaggatggccgcagtgctctagacctggacttggcctggcccggaggacacctgcagcctgggcaggaacacctacccatccaggtgccctgggatgcttgttctgcaggtaatgtccggattaggctcggacctttggacagaccactttcagttggtggtggacaccttcccctggtggacgctggccgcttggcaatggaaggagaaatgcgaatactttccctgtggcccaacctgggcagcctgtcccaggaaggatgctagagaggctctctatacctgtccaagactttcccagcgaccctactcccttgtgtagagcaatggaagcctacttgggggacaggagtacccttgttttcagaccctgcaggtccccgagaagggtctgtgtcatccttaagctgaagctggacccatttctggcccatcactctgtctagtgagacctgagaccgatggacacagcagggccagggtctcctgaggtagagtgtatgttgggggagagccagggggaggaagggtgagtgggagatcactgctgtggtttgaatatgtcccctccaaaattcacatgttggaaactcaatctccaatgcaacagtgtggggaggtggggccttttggtaggtgtttatgtcaggagggctctgcccttctgaatggattaatgccattataaaagggtttaggccaggtgcagtggctcatgcctgtaatcccagcactttgggaggccaaggtgggtggatcacgtgaggtcaggagtttgagatcagcctgaccaacatggcaaaaccccgtctctaccaaaaatacaaaattaaccagccatggtggtgagcacctataatcccagctacttggggggctgaggcaggagaattgcttgaacccaggaggtagaggttgcagtgagccgagattgcgccactgcactccagcctgggcaacaagatggaactccatgtcaaaaaaaaaaagtgtttggtggagagaatctgggaatctggcctctttttgcccttctgccttcaccacgtgaggacatagtggtcctctccactggaggagacagtgttcaatgtcccatcgtggcagcagaaagcagccctcagcagataccaaacctgtggatgccttggacttcccagcctcaagaacagtgagaagtaaatctctgttctttataaatcacccagtctcagagacttgatgacagcagcatgaacagactaacacagtcatgttactggtgcttcaggctcttggggaggggagtctgggtaggcctgacagaggagtggggggacatggggaatggggggcagcaggggtaaggcccatagactccattgggtgtttctctttatggccttgtccccactcctctcatcaccgaggatccctggacacccaccaggagcttccctcttccctggggtccaggcagcagctcccagcatgggcagtgtttcctggacagatgccacttttttttttttttttttgagagggagtctctgtctaggctggagtgcagtagcacaatattggcacactgcaacctctgcctcctgggttcaagcgattctcccgccggccagttttgcatgtctaggggccccttgcagagaagggcaggggcagcacagggaaccctagactggggcctgaagatgaggccttgagtctgtcatctcccttcatgcactgaacagtgcagccacccagggcacggctcttggccgtgatttggggagcgtgacaagacaagggcgtcaggacttggccacctggaagggctttgcttttggatatgcagggaattccctggggcagggcagaatgctacccctcagctctccctcatgggagaccctggcaatcccgagggagaaggcgctcagcacctaatttacttcctctaactgccctgaaggcctagagcaacagttaagaatcacattaccgccttttattgtctctaatttttacccaaatgatttctgctgcaccagcttaaacaggctctcatttcccttcctgctgctgtcatgctctgggtgtgtgcatttctgaaggggtcagcctctgaatgctcttctccctcaatgcaagatgggccttctgtcctcctctcccctccctgggtgggagtaggggcaccagggcaccagggcttactcctgggagggagccctgtgtctatccagcaactgtttgtgcatgtgtgtggggggaccctggaaagtctgcagggtgtgtctgcccatgcgccccctccctcctctgaacctcagccctctgccctggatctgagtctagggaagccagacctatcaagctgtgtgacagtgccctttaaccagactcctttggtggtaagtgacagaaacccagctgaaactgaatgcagaaaaaaggccgggtgcggtggcatatgcctgtaatcccagcactttgggaggctgaggcaggcagatcacctgaggtcaggagatggagaccagcctggccaacatggtgaaaccccatctctgctaaaaaaaatacaaaagttagccaggcttggtggcggatgcctgtaatcccagctacatgggaggctgaggcaggagaatcgcttgaacccgagaggcagaggttgcagtgagccaagatggcacctgggcaacaagagtgaagctccatctcagaaaaaaaggcggggggttgcaggtactcttttagtactcatggagctgagcctgggaatagactttgcaccatgcacgggtggatcagagatatctcgggaatccctctcccccacttttcagctctgctgtgctgggcacagacttgcctcctaggcagcaaagacagtgcagccagggatgccccttagttgagcaggaaacctgcttcccacagggcccaagaatgatcctgacatctcattggtcaggctctggtcacaggcccaccactgagtcaattgctgtgctggggacgatgcctggggtaaatagtcagggctgggccatgttcctctcctggtagcccatggagtgtagatgggtttgggcttaaccaacccacatggaaaggagcaacttcctaatgggacacctaggagctgtgaccacagttaggaacagatctctgctgctaaccttggaggtcccttccctctttcctgcctcagcctccatctctatgtccagggctgggtgagagaattggctctgcaagtgaaaccatccccacatggttgacaagaattacaagccaggttctgggcagaaatataattaagcatcagtcaggctgccctctggcacacttcattgttgctaaaattcatgtagcactagatactgaccatttatttgcacgcctattgttcccatagatgggatttcagacattagaatcatacagcttttgtctaaggattctgtaagatgtgtttcccacctcgaactccagcaccagtttgaagaccccacggaggatggggatcagcctgagaacccagctccttcctctccctgccccaggacttcaccctgcatgcttccactcatcaacaatctccatactacacccattccaaaacccttacaatctccagccccaaactccttggggaaacggattggaggtttcctctcacctccttattctgtaacccgatgattagttctctctttctgctgcaacctggtgtctcggcgtgctcacttgctgtgagcagcgggctgtggccatcatggttacacgggagcacctggaagatgctgttgctactcttgttgtcttattttgtccctgggcagatgtggacaggagaacgctggtgggagtgtcaggcatgtcctccggctttctccccgcctgcagcatctccctccccaggagcactggccaaagcctgccacttccatcaccacactgtctagagagttcccagcccatgtccttgtaggactttctcagagccccactgaatggcaggaaagtttttatttccccaagaccctggaggtgtcggggcctcagaggttctgtgtgggaagagagaggacttttctgctgtaaaagccagaccaggcagctgcatggtgctcctgcctcatggacattcaaataccttcttggaccctcgtgcttttcagaaaaaatgaaagagcttgaggactggaaagctgggaagctggaaagacagagagcccatgcccatcatttctaagtgaggaagcagaggcccagagaggttgaggactttaccagagccgctcagcagtgacagagtctgcatctgcccagtggccagtgcagagctgggactggagcccaggtttctctccttgggggtctctgaaagactcccaaggcaggctcggcttttccaccctctttcctcctccattgctcaagtctcctggtgtaaacttggtctgcttccttccaatgctcacccatgttcttattcctaatgcctgcactgtcactgccttggcggggacatggagactcagtgacacacccttaggctggggctggagagagcagcccccctgaaggctcctgccccacaccagcctctgtgtccttgcaggccagtatggtcagaaaaacccagtcctggaatcactgtcttcagaaccacagggaccagggaggcagccgtcccccgggaccactagctgcaggcctggaggcatcctgctcatgtgagttggagagagctcaccccagccctgccaagcccctcttcttttgaaagaagccaaagtgagcggtgataaccatcagttaattatcgaaggaattctatgcttcataaattgttttctttctgagaggaaaaggaaagtctactgaaaatgggattttagggtgtgtttcaggcgaataggatgatgtgggccttcttctctaattcttatccagtgcagtgttcaccaggctcccactttcacaggtcaccatggcaatgggaggacatggagcagggcatccctggaaagtgggtttctgagcccatgtgctcattgccaggcccctgcagggcgagccccatcagctgtcttcctgcttctccttctggttcatcattcttactactcatgagcaccgactctgagcctggcactggactggtgctttccagaccgtgctgccctgagaattgagtgtgacatcatgaacgcctgttcacaggttaggaagctgaaactccaagattctacagcatttgtccaagcttccccagggagtcaatggccctggtcgcctggctccctggctcttgcccttaagttctgtgccttgctaggcaagaacatccaccttttatagaccaggactccggccttccagtgctatcagcacacccaggacaaacatggggctccttccctctttcccttgcgtgtcttgttggattaagatttatttttaacccagagcaaatctggggagctggccaccctgtcagatgccattggctggatgcttctctttttgcaagagaaatggctgactgaggacctgcagccagacctgggacatgttgtccaggacctggacttcatgttaatggcatcttctgaaatgacagagcagcatcattactcccagtcctattctaaaaatggacccatctctaggtcaacatcctcagcacagttcccacccacttgctgatattgtcaagtgcattggctagggttgtataaggcaagggagtcagaaggagttctttctccttctctccctccttcccttcctttcttccttcatttctttaatattatgcttgtgacaacaaaattaaaatttttttgtgtcacatttttcaattgctatccattcatccatccatccttccctctgtcaattcatccatccatccattcatccacacatctattcatccattcatccatccatccatccatccatccatccatccatccatccgtcaatttgttcatccatcaatccatccatccatccatccatccgtcaatttatccatccatccatccatccgtcaatttgtcatccatccatccagccagccatctgtcaatttgtccatccgtccatccatccatccatccagacatccattcatttacccatccatttatccacccacctatccatccatccgtcaatttgtctatccatctacccatctgtcaatttgtccattcacccattcatttatccacccacccacccatccattcatctgtcagttcactcccatacattgtctgtcagtccatccatccatccatccatccatccatccatccatccacccatcaattcacccatccatctgtcaatttgtccatccacccatacacccatccattcatccacccacccacccacccacccatccattcatctgtcaattcatccctcatatattgtctgtcagtccatccatccatccatccatccatccttccttccttacttacattttttttttctttactggatgtttatttacatcactgctccctgtgggcaaaaattactcaatccgttgagtctgtgtttagttgccttgaccccagccctaatttcctgttcacttttatatgtcacttctttggctggatggacagacccagtgggtcatgaattgcccctctgcaaggcatccttctcatatgcagtgatgacatagctcttcctctcctgagtcacggtaggtgaatgcctccaggctatcattctctggatacatgtggctctttgatcttgagcaaatttacaggcccctaaaagaactggtttgtctgaggagaacaaccaaggacagaaaattgagtctcatccttgagtcaaaatgcagacttcctattgaaatacaaatccatcgtttcaaaaggtcagctgggatggtacttaaaaaaagaattgcagctggttgcgaatagggcactggaaacaaaaacgtcccatccaagaatactctttggccctgtgcccacagcttcttgtgattgtggcttggccgcattatcattctctttcagttcctgtcactcagacttgcaagcctggagagagaaggccagccagatagatggacaggcgatgtgcaggcaggtggcctctctacctaagtatacgttctcagggtgtgggcatctcagcatagagccagctgcccttcaccagccccattcacattcccatgtccccgggcccactcagccttaccttggaacatattctatttcttagaggccaagctttggccagaaatgagtgtcccttacctcctccacaccatgtttcacttccaacgaacctacaggcctgaacaaaggtcctatctacttccccaagggcacacttgacattatcccacattcccatcccttccaacactcaactgagccttcagcttttggctctgtccctgaaatagtttggatatttatcatctccaagtctcatgttgaaatatgatccccagtattggagacggggcctaaggggaggtgtttgggtcatgggggcagatccctcattgatggtttgatgctatcctcatggtaacaagcaagctgttactctgttagttcacacgagatttggtcgctaatgagccaggcacctcctcctctctcttgcttcttttctcaccatatgatgtgcctacccatcatttgccttcacccatgactggaagctccctgaggcctcaccagaggctgatgccagctctatgcttctggtacagtctgcagaactgtaagccaaataaacctcttttctttacaaattaccccagcttagggattcctttatagcaacgcaaaatggtctcacacaatctgcatggccttctgagactcacccagtgcctgggcctgcccagctaaggttggaggaggggggagacagagaagttaccaagtgagctcatttgcttatttactgctccacacccaccttgttcccaaagcatttaatgcagatgacaaaaatacatacagcacaatagtatgaaaatagaaaagagatcaaggcaaagggataaaggcaaaggagtgaacggtgaaccaaggccagggataaagtcaaactatagaaacttacgctttagaagtgggggtggggggtgaagggggttccttcaataaattccatatataaatttctgaattttctttacaataggaagagctgactccctgcaaacatacactgttttgctttagggaaggattttgtcaaaggtgtgtttaaagggagtctccttaagtgcatttgaaggaagatatggtttataacaactccatttacacagaactttgtcaacagcggtcagtggatagccctgtctgtggatccctcgtggctgtccctgggcagactgtaccacctggacagcagctgttcccctcaccggcattgctaagcaagtcagtgagttgacatgatggagcactttccaggtgtcctcgcccaagggaggtggcaggaggacagggacacagaagattggagcacgtgcccaggagctgagtgagtggtgctgactttgagctcaggcatcctcagtaccggaagaacaaggtgaaccactgcactatttaagaggggaaattgtatagtgcctggccatcacgacacggatcaatgggacatgaccactccctggtggcctgcatttgggacccacctcctttggggcctggctggcctcatgggttggtcagcctgtggccaggaggcgctcactgccacttattgaatcacatgggttgaatctgctctcgcggagctctgggtccccacgggcagtccctgaccccaggcaggggacagagggtacccagcaggatgctgcccctgccttacatggaagccatgcatctggcctgttccccacattctgtgtaacaggaattctacttggatccaggaaggaaaataaaagtgttttttgttttttgtttttttttttttttgagacggagttttgctcttgttgcccaggctggagtgcagtggcatggatcttgactcattgcaacctccatctcatgggctcaagcaattctacttcctcagcctcccgaatagctgggattacaggcgcctgccaccacccctggctaatttttgtatttttagtagagatgaggtttcaccatgttggtcaggctggtcttgaactcctgacctcaagttatccgcctccctcggcctcccaaaatgctaggattacaggcgtgagccaccacgtctggcccaaaagatgtgcatttctgttttctcacggaaatactgtttaatggatctcttcctatgccctcctgtctccttgcctctctgttcctccccatcacctctctctcttcctctttctttctatctcagggtgatttcaaaaatcccagaatatgtcaagaagcctttaacaaggggagagagaattaagccaaattaattacagcaaaataagtggaattaggcttaatttaagtaggtaacagaaaagaacggagctggtcttttccccttcttggaaggagtcctttaagggtttttttttttcttttttttcccaaatggaagggtaacatggctgcttggctcagagcagcgtgctctcctcctccggtttgccctgttctcctggactgggattaccggcttgcaagtcgctgaccgtggttgaattttatcattattaaggttcagtgctaacctcctccccttatttccttcccatttaaagtttgggggataataaattcttttgatttagcaattatgggagcacagaattagtcaaacgcgggctttgagaacaaagtagaatggggacccggtgggcttttgccgagaagccacaaatactcacaggcttgccatggaaagatctgggggaaatggtgctttgttaagtctgaaattggatgggttttaatttaagagcatagctccaaccctcacctctctctctaagcagaaaaatagttatgtttgtgggtgacatattcctgaagtcaattgcgctaaaccactgtgctgaaatacattatattgacttgtctggggctgtgctttttcgagtacaacattgagttggctagtaataaaaataaataagaattatatatcatttcattcattgttttggtattacagatgcaaaatgcgcaaagatataacacaacatgttgcaatacacttttagaaaatacaatgataaaattaatccttgatacggaatgatgtgtgtgcatgggttaaggcggaaggcagagagaagcagtgggtgcttggaaggtgcagccaggtcaggtactggactgacatccgtgttctgggtgggtgggtggaggccagaaggggcttgtagtgccccccactgacaaggagaagggaccctgcctgcagctgatgtgtggggcgaccgctgccctctctgggcaggctggagcctgcctggaccccttccatcgatgatacttggtcagcttgaggcctggtcccccgggctgggccctgttaggaagagagatagctagagtgtccctgcccactgcagggtggggttggagccaagtagaacaagcatttgtttgctgttggtttcctttgtctatgaagcagccctgagctggaacggttacagtggggtgtagacaaatggggaccctagtcccgggatcctcaggttcactgaaagtccctcagtaaacacactggaccgttcacccgccagtctctgggctcagacctgctgggggtgggaagcacccactggcctggagaacttcagggtggaggtccaagggggaggccctaaccccaaccccgacctttaggtaatccagtctcttagtctgacagcgtggggcagggagagcccccagaccaatcccatcactgggctctggattctccccgtcaccctccccagcatctgccatcccagacgcatgtgcgcacacgtgtggatgcaggcacagatgaaggcatacacacacatgagcacccaggagaatgcacacatatgaacatatacacgtggacatacacacacatgagcacccaggagaatgcacacatatgaacatatacacgtggacatacacacacatgagcacccaggagaatgcacacatatgaacatatacacgtggacatacacactcatgcatgtagagacatgaagctgaattctcatgtgtgcacacacgcacacatacacacatgcggagacacctacacacagaagacctgtccatcccattcttaaggcttctctgaggtgggacaaccttccccttccccaccaccgcaataagggtcccagtgctgtctcctcccctgccctgcaccctcctccctggacccagccccaaccccagcttctcggcagccccagctacccctggcatctctggtgccctctctccctcacaggcagcatgacctctgacttagcaccccagtggctccccactgctctgggcatgaaacctcatcttcacctccccaccacagcccagtgtggccctggccttccaaccctcttccctacacgccccctgctcccggctcatcaccacaccagcgtggggctctgtcccatcctcatgaaggcccatgatccctgcagagctcagctgagcgctgcccccaccaagccccctgctgtacctcactggtcccctccgccgtaaagctctcccacagcggcagctaccaaccctccttacagtagcctgcgtgattattccattacatctgactctccctccagactctcagctccatgaaggcaggggcctgtctgtttgctgtctgccgtgtctccagccacaccagggttcaatacctttgctgggtagaggcgtcagtaatctcactgcagagggatgcagtctcccagagtctctccccctaccccagccccctcctatgaggacctgggagagtcttgcttttcatagcagaggctgctgagcccctgggcagtcacctgggatgagaactgtgacctgggatgagaaccctggtgtcctgactcctggctggcctcggagactctcccactccacccctagctgggcttgccggcagcctctgagggtcttcctgaatgactagaaggatgtcccctgcaccctcccgcagcagacaccagaccctgctgtcagcgaagggaaggaaggcaggcctagaagccagcatgtgagtgtcatcgttgtagggaagggatgtgctgccacatggagaccctgccactcactgcccttcctgctcagagggaggagggagctgagatagatgtgaagcaatggagtctggaacctggggacctaggggccatggggacagggacagtggggaacagagccatcagctgcccttaacaaagtctgtggtgggcaggggtagaggccctttctgccactctcccaccccagggcccagcagacagagagcctgactggttcctctctgtgcatattcggcggcagaggtggggaaaaggtgggaggggaaccctaacctggaggaagcagagtgtctcgggctggcggtgggcccgggagaggcacgggaggctgagcaatgaggaggccctttcctttcacatggcccatcagctgattgtcccctggctccctctgccatggcccagggtggctacctctgctgcaggcagccatggaagcttctcagaggctgcctgctgggtgctggcctggaccccttccattgaggctcctcagctggctggaaccctggcctcctgcaggctggaccctgttgggaagagagatggccagagtgtccctggccactgggcaccagcaggggcaaaggatcccagtttgagccaggcaggacaaacgtttgtgtgtggttggctcaggcgggctccacccccaaaccctgctgcatggcagggcatgcatcttctcggtgaccttggtgacctcaggatggggacagtgcctggaggtctctcacccaaaccaggctgcaggcactatggcttctccaccctgtctagcctggaggtgtttgcacgggcagagccttgagcttcccaggctcatccttcagaaacctccccagacctggtcccgatctgcccacaccttcctagctcacagtacagcccagcatggagcatcccgcttgacaataatgtgtttattgggtgattacttgacaagactgtgggcttttcaagaacagtcttctctgatttggtcagcttagcacccagcttggcttgccacatgtgctcattaaaaaccactgattccattaatgattatgagaagaatgtgcacacgtgcttaagtgtagtgtgtgcatgactgtgagagcgtgtgatcgagtgcacacatacatgaatgtgtgagcacgtgtgcacatttgtgtgcagttgtgcatatgggtatatgtgtgtgcacatgtgagtgtgcggactcagcacgtgtgtgtctgtgtgagtgtgtgggtatagcatgtgtgtgcactgtgattgtgcatgcgtgtgcatggatgttatggactgaattgtgtgtccctgccctagttcccagtgttctggtattaggaggtggggccttttgggggtgattaggctgagatgagctcatgagggtagagccccaggatgggattagtgcccttatacaaagaggaagagacaccagagctctctgtctgacccccaccccccatatgaggactcactaggaaggcagccgtccacaagccgggacctcaccagacactgcatctgcagcaccacgggcttggccttccagccttcagaacctcgagaaataaatgtctgttaagaccccccagtctgtggttcttcactctagcagccctggctgactatgaaagtgggtacagtgtgtatgtgtgtgtgtgcatgtaggtgtgagtgtgagtgaatgtgtgtacatgagtgaatgtgtgtaggtgtgagtgtgagtaaattcatgtgtttgtgtgtaggtgtgtgagtgatgtgcgtgtgtgtaggtgtgtgagtgaatgagtgtgtgtaggtatgtgtgaatgtgtgtgtatgtacgtgtgaatgtgagtgaatgtatgcatgtgagtgtaggtgagtgaatgtgcaagtgtgtgtaggtgtgagtaggtgcgtgagtgaatgcatgtatgtgtaggtgtgaatgagtgaatgtgtgtgtaggtgtgtgagtgtgtgtggtgtgtgagtgaacatgtgtataggtaggtgtgtgagtgaacgcatgtgtgtaggtgtgagtgaatatgtgtaggtgtatgagtggatgtgtgtctgagtaaatgtgtgtgtatgtctaggtgtgagtgtgtgtaggtgtgagtatgaatgtgtgtagatgtgtgaatgaatgcgtgtgtgtaggtgagtgtgagtgaatatgtgtgtgggtgtgagtgaatgcgtgtgtatgtgtaagtgtgaatgtgtgtaggtgtgagtgagtgtgtgtgtagtgaatgtgtgtgtacatgtgagtttgagtggatgtgtgtaggtatgtgagtgaatgcatgtgtaggtgtctgtgagtgaatgtgtaggtctgagtgtatgtgtgtgtgtgtaagtgtgaatgtgtgtaggtgtcagtgagtgaatgtgtatgtgtgtggtgaatgtgtgtgtacatgcgagtgagtggatgtgtgtaggtgtgtgaatgcatgtgtgtatttgtaggtgtgagtgaatgtgtaggtgtgagtgtgcatgaatgtatgtatatgtaggtgtgagttaatatgtgcataggtgtatgtaggtgtgtgtgtgtaggtgtgagtgtaagtgaatgcgtgtgagtgtgtgttcagagtgttcccagataccagatgttgaggagggacctccctagggcagtggctctgagttctccgaatccaggtctccctccagagtcccctggggtctctgagcaccgccctgagcaggttttcaggccagtgaggctcactgattttccattctcagaactgtctgaaatccacgaccagcaactctttgccctgggctgccactggttccacatcaccatgttcccccagtcccctactgtgacacccagtggctgctcctgcgggtggagcctgtggtgtccaggagagtctgggagctgtggggccactgcagtcttttacacagagtccctggggagacagctgtgcttctacttaacagcctctgctgaaggcccacgggtgccaggcactgggctagtttctgagagggagccatcccagcctgcctttggggtatccctgacagagatttgaaggggcctctgggaggtaggaggggatattcccagccatggctagaagctgggagggcctgagtgcgttggggagcaaaaaatcaggtgccctgttcacacccctgcagtctctaagtacagggcgtggggtgcctctgccagagtggacccaagggagcacctctgccactttgccacagagccctggccctcaggctgctggaaggggccaatgcattggcgacaggatgtgggtggcagtgcctgggagaggtgaagctgccctgtggaggggctggagcaggagaagggagctggtgacattaagcagtagccacgacaggtgggagtgagctggagggcttctgagacaggctggtggctcccagagacacactgtgcgcaggtggggggcatgcggtaggtgggagccctgcattcccaggagtgtatatgtggccactggacatgaccttaccaaaacagggagatgggggaaactgggcttcaaggggacaagctaggccagtctttaaggagctcatggggctgtgtaggaggggtgctgacaagatctgacagcagctgttcccagtcaaggtagacactgctatgtgccacacagggcatgcagacagggcactgcaagggttgaagggagtagggagggtgaaatgtgctctcttggtctgtggcaggtgccgtgcaaacttcctgctgtgtgttcccttgtcctgtgtcacctacatccttgatgtctgcggtgaatggccagtgacagtgttaatggatttcctaacatgatcccctgaccaacgcggctgtagggcagacacacctctcaggcacagagcgaagcccccattgcagggtggtctggggcactctgtaggggcaagcgggatcctggtcgtttattgctttggctgttacaaggctctttctggaaggccacatctgttctcggatgttcacccagcagcccaaacagacaggtcagatcccagccctgcaatgtgacttattcaggaacctttaaagtggctttgaaagtcatttggtgccagatgtaccaaatgtcttggatgggctagagggctggggctgtgaggtgagaacttacctggcattgggactgccaggtacatccccaaagccacgcccctccagaaggcatctgttgagtttcatatgccccaggaggactctatatttaaggccaggcaggaggacaccctgagaaaccacgctgtcacgactcagtctctcagaatgccatggcagtttaaaaaaagtacacatacactttttgccacatcttagatgtccctccgcctacagaagccatcaaataaaaattaattttgcttcaaaaaaaaaacatgctgaatatttttgacactcaatgtctgttcatttgcatgggacacgttcttccataatgaatcatcgtaacgcttaaattaaacacagtaaaagaatggttaatgccataacacgctgacaatttaacctggccaatatttttattgccttgtacaagaaacctaacagagcaccacttgcttttgactggtggaaaatcggttatgaaccgccagggagcggccaatttttcaaatgcagtcattcagtcatacgatagccactatgactttttttttcccatacactattgctattataatcttttgagggtatttttatcacggcaataacctcctcaaaatcagtctttacagcagttaatgattggacagctggagctataactggccttggcattgcccccagctattagctaacaaaccagttgttatctgcaggtaacagccaatttcttgtggaatttttttgataaagtgcctcctggatcgaaggtattttttccctctttgtcccagcttcaagcatcttggggagcttggtgaagagatggaaagctggtggctctgtaacccccaggcatggagcgggatctctgagggttgctgtattgccacaggagagtggggactggcttttgtcgctgcctggctttgtgaagtgcagggtgagagtctggagaaagaggctgctctgctgaactggctggacagagaagggagctgactgccttggaggcgcagagaatggaccaggcagggccaggccttgagcgaccctgggagttggggtgaaagccaaacaatggggtcaattccattgttgagactcatttggtgccagatgtaccaaagatcttgggcaggctagatggctggggctgtgaggtgagaacttacctggcactgagacagccaggtgcatccccaaagccacgcccctccagaaggcatctgttgagtttcacatgccccaggaggactctatatttaaggctcggcaggaggacactctgagaaaccacaagagaaatctactgagtggacaggcaccttgcgtttgataaatctctgtgtttagatttcgatatcctggtttcatgtgtgtttcatttttgatcacccttctaaaatgtgagcttttaaattcgtgacttaaagttaggaaatgttcatctattttaaagtgaacacctttttttataaggaccagattagtaaatttggaccttggcactgatggctaagctacgttcaagcacaggatccttgttgggatgaaattctccaggttaacccaagtaaaattcagagcgggaatgttgagatagaatgctggaccaagagaagctaactggtaaagggacagcctgccttctgcgcccgcaaggccttctgcttttcatgctgcctggagagaggagccgcttcccttttcagccgtgactgtgttttaatatccctggtactaagtgtcagaagtggattgggtgctgcagcactagagcgaagagttaacatgacagcgatcacctgtttgtggcagcagtttgagattctgcagattgatcagtgtttactgtgtgagacccagagattcgattcctgaaatcacagggctgattgcagtaactttacatatgcgtccttaacaagcagggcaaaataaaaaaattaatattcttaaaagtgaaataagatatttccagcctggagagaagaccaattaaaatcacttcacatttttaaatgagttttcatttgagagagtggaattctttgaagaatatgagttttgctaaatatttgaaatcatcatatatcgtgcttatttgaagcccaggttgcttataaattcaatgacaaattgagaagtaagcacagaatttatgtttgaattatctgttgggtgactcccctgctggggcaggccccggtttcttaaatttggagggtcactctgggtaagctggaaggtaaactaggcttcctgcgaattcccaaattcaaatactgccatgggactaaagcaattccatgattttaaatcattttgaatttcataaacccaactctttaaccttttgtaaatgacaagaagtgcaacccattcttaacatttctgatcattccacacgatgctggccccataaagctcatcttttccaaatttaagcacttaaaaatgtgaagtgctccaataaatttaaattggcatatgctacgcatatcaatgggaaatgattcaagcattagaggctggaagtggtgagtgagggcaagcacgccagagcatccattgtcacaggattgatttttaatgactttctattgatttgatgccttttaaacctgaaggccgaaggttggtcctgcatatctatcacgctgtatctttggccgatgcactctcccgaggtgaatgtaggttgctttcaccctcttgccaagacagtgtcctatgaggatgcaggtccttcggggataggtcctggcttgcatagagccttccagggacaagaagtgaacagccacctggcagaagtgcagcccagtcttcaaggctctagtggttgtaagcaacaacatccatttcaagccaaaaagggatgcaccagctttcataactgcaaaggcctagggtgagtcagggatggctgggtgcagacactttctccttcccctttttttgtctctctctcacttcattttctctctagttctcttgcttccttttttgctgcacctctcctccatttctgcttctcagttgggaaaccttcaggcaaggctctgtgcgctttgtagcctcgggcagttccaggctcctattctcatgctcccaagtttatcagaaagaaatcctatctcaacaatgtaaaccaaaaatacaattctaaggcctcccaaccatctgaatggacccctcctctcagccaagggcactccaaagttaacctaaaaactagttcaaaccatgatgggaagggggagccagacatgcctcatgataccctcctccctttgggaattactgacagacagactctttaaagtctgataagaaacattcacaatctattctctctggagcctgatacctggagacatcatctgcatgataaaacctcaggctctacaccttatcataacccacacatttctttctattgataataactttttcaacgaattgccaatcagaaaatctttgaatccacgtatgacttggaagctctctgcttccagttatctctacattctggacccaaccaatgtacattttacatacattgactgatgctttatgtctccttaaaatgcataaaaccaagttgtggcttgaccaccttgggtgcatgttctcaggatctcctgagggatgtgtcacaggccattggtcactcatatttggctcacaatacatctcttcaaatattttacaaagtttgactgtttgttgacaacaatatcaaaagagggtgtgaatcgtgggtcactggaccatcttgggtcatgtgcccagttctaagccagttgccatggtcagggggatccaatgttctgattggccccattctcactcctagagctaggagtggaataaaatcccaaacactggaacttggagtgagagagagataagtatgagtcctatatggggcatggaggtcccttctgactccagatgtttctgattctctgttgtgagtaaaattgcttctgcttgtttccttgcaattgttacaggaaaggggtcctgatctagaccccaggagagcattcttggatttcactcaagaaataattcaggacaaatctgtagagtaaagtgaaagcaagtttattaagaaagcaaaggaataaagaatggctactccatagacagagcagccctgagggtagctggttgcccactgttatggttatttcttgatgatatgctgaacaagggtggattattcatgcctcccctttttagaccatagagggtaacttcctgagctggtgggactgtagcagtgaggacaaccagaggccatcttggatttgaggggatttggcctgcttctttactgcaacctgttttatcagcaaagcctttatgacctgtatcttgtgctgagctcctatctcatcccgtgacatagaatgccataattatctgggaatgcagcccagtaggtttcagcctcattttatccagcccctattcaagatggagttactctggttcacaacctctgatacaattagctgtgctgtgtgatttgccatggccagtgaccagggaaaccaagtgtgtcacttcttggtggaaaccttaagaattccaggcagtggatgttcttgcagcctgggacctgagtagagaggcccaggagtggagcccttggctagccaacccatgattaacatgaacaatggaagcaaacattggttattagaaaccacagatatttgaggattgttcatagacacaacataacctagcctattctgtgtgatgtggacatcagtatcagaaatgaggtcttaccaaaacccaaacctaaaatgtatggcattgactttgtgttgggttagtgaacagtgaagaaatttaccagaggctggaaagatggcaaactatgtgatgatgtagtaaaacatttggcaaaactgtcatgtgcagtaattcaggagacaaaatggaaacttgcagttcttggggagagtttcggggatggaatgttcatggcgtgtggtggtggttgttggctgcctttggcaaagtatcagaagaaaaagatgaatttaaaaataattttctgatttgtaagcaggaataaaagagaatactcagggagtactacggttggaagctgcaactccttctcatctcctaacagcaaaagctagaattgagaaacactttcaatgacaaagtccttaaagaaatatgaaatcatgaacattgctttcatacccattgttaaagtctctgaatggatgaaagtgtttcaggcaaatactcattacaggatgtggagccccttgaatactttcagttggacaaaatcctgagggaaaaggaggttaagatgagatcctcttcccaaagcttgataggttcaaggcatatattataaagcttaaggagagatgtggagaattggaaaaaatatccctcccccctgcatattaggaaaagaaatggacaatgcacaagtgcacaccctctgttgaacctatcagaaagctgaggcctcaggacaacactaaccccaaatctggagagtgacaggggtctttgggggaagcagggggcgtggcacttgcttagctgagggcagaagtcatcagacactggtaggaaggattcagctagagtagtggatgcatgagtgaaggctgagaacaggctggtgaaacgatgtgaagcccatggagctgcagaaatgaaggcaggtgggtagcctcttgcaagcttcttctcaaaccccaccaggcactcacagggaagacagggaaggatcttgagaaagtttcctttgtgcaggccttgggaagggaaaaaataaccaccacaggagaggcagaaaactctactcagactattctcttctatctctcctagggagcaaaagccttaatttgcaggacaaaggccatcaaagactgttgttgcacttagcgcattaagaaagcccattgcagctgggataagagagcagaaaaaaatacgctagccctggggaagtggtaggaaaaagtactggattcagaacctataactacagcccataaaaccaacaattgctctagttacaactagagggatttgaagcctctggtgcctagagggtaaatatagtaacaacaaacctcagaggcagtctaactcctaacaagattagtataaaactccacattaaagacccagaaaaaaaaaagttatgcccatttctgagcttataaggctttaatggaaaagatgcacagcatacaaaatcagatgggtaatttcagaagaaagatggaaactataagaagaatcaaatggaaagggttgaaataaaaacagaaacaaatattgataattgaattagagctccccagagcgacaaaaccactaggagattatagacgtagatatagatatagatatatgagggagatttattacagtgtgttatcattcttgcattgctataaagaaatacctgagactgtgtaattgatgaagaaaagaggtttaattggctcatggttctgcaggatttacaggaagcatggtgctggcatcagctcagcttctgaggaagcctcaggaagcttacaatcatggcagaaggtgaagggagagcaggcatgtcacatggccagagcaggagcaagagagagtaggggatggaagcgccacacacttttaaataaccagatctcatgtgaactcagagcaagagctcacttgtcaccaaaaggatggctgaagccattcatgtgagatccaccccaatgatcccaaatacctctcaccatgccccacctccaacattgggaattacaattcaacatgagatgtgggtggggacaaatatcaaaactatgttataagggaattggctcacacaattatggaggctgagaagttccatgacaggctgtctgtgagttgtagagcctaggatgccagtagcatggcttcagaaccaggatagctgatggtgtaactctcagcctgaggtaaacggcacgagagcaacgagcctggaattgtccaaagacaggagaggaagagtatatgtcagctccagcagacagatcaacatatttgcctcttccctatttttgttctctccaggcccccagcaaattggatgatgcgcacctacattgagggtggctctaccccacctagctcactcagactcaaatgctaatttccttgggaaacgccttcacagacatacccaaaaataatgctttactaggtttctaggtattttttatacttcagactaagaaacctaatcaagttgacacctaaaattaactatcaaaatgcctttgacaggctcatcaataaaattaacagctgagtgagcagcaggcttgacagctaagtgaatttgaagataggtcaaaagaaattgcctaactgaagcacaaagaaaataaaatttacataacaaatacacaaaaaagacaatagtgcatccaagagttgtggggcaatatcaaataatatatcacatgcattattggaattctagaaggaaaagagaaaaaatagggcagaaaaatgatttgaagaaataatggccaagaattttctaaaattaatgacagacacaaaactccagatccaaaatgcttagacaataccaaggaggataaatagacctaccctcaaaaaacaaaattaaaaaacatgtaggcatgtcaaattccatctgttaaaaacagaaaacaaataaatcctgaaggcagccagagagggaaaaaaagaccatattcaatacgaaataacaaaggcacttgttttcagaatccatgcaaggcagaagacaatggagtgatatctttaaagtactgaaagaaaaaagaattgcctaccttaaatgctatacccaatgaaaacaggtttcaaaatgtaggaggcataagaagttctccatgaaaaaaaaattaaagaatttatcacttgaagatgtgctctataagaaaagtaaaaggaagttcttcaggcaaaatgaagacagtctcagacaaaaacttggaagagtaacgtaaataaaataaatgaaagtaaaataacttttattttattttttaattactctaaaagacaactgcctgaagcaaaaaataagtagtaattatttgtatatttatacctatgtaaaatatatggtaataacacatagaatgggagggaataattggaggtgtactgttggaaggtctttacactacatgtaaaacatgtataatattacatgtaaaatactacctgtaaaatatactacatgtataatattacatgtaaaatactacaagtaaaacagtataatattacttggagacaggctctgattaattaaaaatatattttataaaccttatgacaactactaatgaaataataagaggcataaataatcagtccatggtggagataaaatggaatcaaaacaatatttaagtaattcaaatgatgggagacaaaagaaataaaaacagaagaaattaattgaaaaaagctgctaagatagattttaatcaaaatacaatttggatcaataaccacactaaataggtatgtctaaatacattaatcaaaaggcagagacttccaggttggataaaaaagcagtatgctatctacaatatactatgtacaagaaactcacaatatgctatctataatatacctgtacaagaaactatacagagctacattaaaagtaaaaggataaaaaaagatataccatgtgcacactggtttcatttctcttgagtatatatctaggagtagaatttctgggtcatattgtaactctatctataactgttgggagaactgccagactgtttttccaaagtggttgtaccattgtacattcccatcagcagtgtttgagggttctgatttatccacatcctcatcaacacttgtttatatttgactttgattacaaccattttattagtccattctcatagtacagaataggaaagcaataggaaaaaaatcaatgaaaccaaaatctagtgcttcaaaaagataaacaaaattgataaacctttaactatattgataaaaagaagattaaaattattagaatcagaaatgaaaaagggaacattactactgactttacagaaatcaaaagatttataaaaaactcctatgaacaattgtataccaataaattagataacttacataaaatgaacaatttctagaaagacacaaagtgattgtggtctacaaagaccaaaatggactcaagaataaataggcaatctgaacaaatagagatggaatgaataattaaaatattatataaaaagaaaatcccaggccagatagcttcactgctgaattctaccaaatctttaaatagaagaattaatactttttgtttactttggagagatcatcacaaacttcaaaaaaatagaagagaaggggacactgccaaactcattctgtgaggccagtattaccctgatacaaaaaccagacaaagacaccacaagaaaagcactgatcccttatgaatacaaatgcaaaagtcctcaacaaaatattagcaaatcaaatccagcaacatgtaaaaagactttaccatgagcaagtaagattcatcccaggaatgcaaggttggtttaatatcccaaaatcaattaatgtaatgtaccatattaatagaataaaaagggaaaaccacattattttcttaatagataccaaaaaaaatttctaccaaatccaacaccttacattaaaaaatactcaacaaactttaaatggaaggagcttcctcaacctcaaacccatagctatcatactcaatggtgaaacactgatactttttgtctaaaataaggagtgcaaaacaaggatatccactcacaccacttctattcaacctggcattagaagttctacacaagacaattagtcaatgaaaccaaataaaaggcatccagatggaaaagaaaaaagtaaaactacctgtagtcatagaagacatgatcttgtgcatagaaaattctaaggaatccactaaaaactactagaactaacaagtctagcaagagtgtagggtacaagatcaatatacagaaattaattgcattcctatactctagtgatgaagaattagaaagagaaattaagtaaacaattccatttacagtagcatcaaaaggaataaagttagaatagacaataaaataaatgaaaaacttttactctgaaaactacaaagtattgttgaaaggaattttaaaagatctaaataaatggaaaacatcccatttcggtggattgcaagaccaaatattaagatgacagtactcccccaaataaatctcattgttgaatagagtgttctatagatgtgtattattctataggccaagtgataaattatgtaaataatgttttacacagttgctttttaaacctcttaagagaagaaaagagaagagtatacatttatactgcattctgtaattatatgatcacttttactagtattgttttttcttgtggatgcttttaacctgaacaacttcccgccttaggacttgttgtaaggtaggcctgttagcagcaaattctctctgcttttgtttatctgggaatacatttatgtcacctttagttttggaagatagctttgctggatacagaattcttggttgacaggtttctttttttttttcttcatgcagttttagcactgtgttctggccttttttgtttctgttaaaaagtcagctcttaaacttactggggtttccttgtaagtgatgagtcatttttctcttggtgctttcaatatttcctccttctctttcacttttagcagtttttttttacgtgatgtgtctggatttctttgtgttaattccacctacttggagttcattaaattttctagatgggtagattaattttcaatgaatttgggacatcttcaaccattatttccttgaatattgttttctgcttctttgtctctcctctatgtccagtactccaattacatgtatgttggtgtgcataatggtctctcaccaacttctcagaagctctgttcatctttaaaattcttttttctctatgttcttcagattgtataatctccattgatctgtcttcaagttcgttaattattttttctgccagttcaaatctattgtggagctcctctagtgtatttttcattgcagttattgtgctttttaatttcagaattttcacttggttattttcaaataatttctatttctttatgaatagcccatatttaatatgacattataatatatttctctttacttctttagtcatggtttctttcagttctttgaacatatttataatggctattttgaagttttttttttattatactttaagttctagggtacatgtgcataatgtgcagctttgttagatatgtatacatgcgccatgttggtgtgctgcacccattaactcgccatttacattaggtttatctcctaatgctatcccttccccctccccccaccccatgacaggccctggtgtgtgatgttccccaccctgtgtccaaatgttctcattgttcagttcccacctatgagtgagaacatgtggtgtttggttttctgtccttgcgatagtttgctcagaatgatggtttccagcttcatccatgtccctacaaaggacctgaactcatccttctttatggctgcatagtattccatggtgtatatgtgccacattttcttaatccagtctatcattgatggaaatttgggttggttccaagtctttgctattatgaatagtgccgcagtaaacatacgtgttcatgtgtctttatagcagcatgatttatagtcctttgggtatatgtccagtaatgggatggctgggtcaaatggtatttctagttctagatccttgaggaatcgccacactgtcttccacaatagttgaactagtttacggtccctccaacagtgtaaaagcatttctatttctccacatcctctccagcacctgttgtttcctgacttttgaatgatcgccattctaactggtgtgagatggtatctcattgtggttttgatttgcatttctctgatggccagtgatgatgaatattttttcatgtgtcttttggctgcataaatgtcttcttttgagaaatgtctgttcgtatccttcacccactttctgatggggttgtttgttttcttgtaaattcgtttgagttcattgtagattctggatattagccctttgtcagatgagtagattgcaaaaattttctcccattctgtagtgtgcctgttgactctgatggtagtttcttttgctgtgcagaagttctttagtttaattagatcccatttgtcaattttggcttttgttgccattgcttttggtgttttagtcatgaagtccttgcccatgcctgtggcctgattggtattgcctaggttttcttctagggtttttatggttttaggtctaacatttacttttttaatccatcttgaattaatttttgtataaggtgtaaggaagggatccagtttcagctttctacatatggctagccagttttcccagaaccatttattaaatagggaatcctttccccattgcttgtttttatcagatttgtcaaagatcagatggttgtagatgtgtggtataatttttgagggctctattctgttccattggtctatatctctgttttggtaccagtaccatgctgttttggttactgtagccttgtagtatagtttgaagtcacgtagtgtgatgcctccagctttgttctttttgcttaggatagtcttggcaatgcaggctcttttttggtcccatatgaactttaaagtagtttttttccaattctgtgaagaaagtcattggtagctggatggggatggcattgaatctataagttaccttgggcaatatggccattttcacaatattgattcttcctatccatgagcatggaatgttcttccatttgtttgtgtcctcttttatttcgttgagctgtggtttgtagttctccttgaagaggtccttcacatcccttgtaagttggattcctaggtattttattctctttgaagcaattgcgaatgggagttcactcgtgatttggctctctgtttgtctgttattggtgtataagaatgcttgtgatttttgcacatgggttttgtatcctgagactttgctgaagttgcttatcagcttaaggagatttggggctaagatgatggggttttctaaatatacaatcatgtcatctgcaaacagggacaatttgacttcctctttttctaattgaatattcttcatttctttctcctgcctgattgccctggccagaacttccaacactacattgaataggagtggtgggagagggcatccctgtcttgtgccagttttcaaagggaatgctcccagtttttgcccattcagtatgatattggctgtgggtttgccataaatatctcttattattttgagatatgtcacatcaatacctagtttattgagagtttttagcatgaatggctgttgaattttgttgaaggccttttctgcatctattgagatagtcatgtggtttttgtcattggttctgtttatatgatggattacatttattgatttgcatatgttgaaccagtctttcatcccagggatgaagctaacttgatcatggtggataagctttttgatgtgctgctggattcagtttgccagtattttattgaggatttttgcattgatgttcatcagggatattggtctaaaattctcttttttttgttgtgtctctgccaggctttggtatcaggatgatgttggcctcataaaatgaattagggaggattccctctttttctattgattggaatgctttcagaaggaatggtaccagctcctctttgtacctgtggtagaattcagctgtgaatctgtctggtcctggactttttttggttggtaggctattaattattgcctcaatttcagaacctgttatcagcctattcagggattcaacttcttcctagtttagtcttagaagggtgtatatgtccaggaatttatgcatttcttccagattttctagtttatttgcgtagaggtgtttatagtattctctgatggtagtttgtatttctgtgggattggtggtgatattccctttatcattctttattgcatctatttgattcttctttcttttattctttattagtcttgctagcagactatcaacgtgatgatcttttcaaaaaaccagctcctggattcactgattttttgaagggtttttgtgtctctgtctccttcagttctgctctgatcttagttatttcttgtcttctgctagcttttgaatgtgtttactcttgcttctctagttcttttaattgtgatgttagggtgtcagttttagatcattcctgctttctcttgtgggcatttagtgctataaatttccctctacacactgctttaaatgtgtcccagagattctggtatgttgtgtctttgttctcattggtttcaaagaacatctttatttctgccttcatttctttatgtacccagtagtcgttcaggagcaggttgttcagttccatgtagttaagcggttttgggtgagtttcttaatcctgaattctagtttgattgcactgtggtctgagggacagtttgttataatttcttgtcttttacatttgctgaggagtgctttacttccaactatgtggtcaattttggaataagtgtgatgtagtgctgagaagaatgtacattctgttgatttggggtggagagttctgtagatgtctattcggtccacttggtgtagagctgagttcaattcctggatatccttgttaactttctgtcttattgatctgtctaatgttgacagtggggtgttaaagtctcccattattattgtgtgggagtctaagtctctttgtaggtctctaaggacttgctttatgaatctggatgctcctttattgggtgcatatatatttaggatagttagctcttcttgctgaattggtccatttaccattatgtaatggccttctttgtctcttttgatctttgctggtttaaagtctgttttatcagagactaggattgcaacccctgcttttttttgttttccatttacttggtagatcttcctccatccctttattttgagcctgtgtgtgtctctgcacatgagatgggtctcctgaatacagcacactgatgggtcttgactctttatccaattttccagtctgtgtcttttaattggagcatttagcccatttacatttaaggttaatattgttatgtgtgaatttgatcctgtcattatgatgttagctggttattttgctcgttagttgatgcagtttcttcctagcatcgatggtctttacaatttggcatgtttttgcagtaactggtaccagttattcctttccatgtttagtgcttccttcaggagctcttgtaaggcaggcctggtggtgacaaaatctctcagcatttgtttgtctgtaaaggattttatttctccttcacttatgaagcttaatttggctggatgtgaaattctgggttgaaaattattttctttaagaatgttgaatattggcccccactctcttctggcttgtagagtttctgccaagagatccacttttagcctggtgggcttccctttgtgggtgacctgacctttctctctggctgcccttaacattttttccttcatttcaactttggtgaatctgacaattatgtgtcttggagttgctcttctcgaggagtatctttgtggtgttctctgtatttcctgaacttgaatgttggcctgccttgctaggttgtggaagttctcctggataatatcctgaagagtgttttccaacttggttccattctccctgtcactttcaggtacaccaatcagacgtagatttggtcttttcacatagtcctgtatttcttagaggctttgttcatttctctttactcttttttctctaaccttctcttctcacttcatttcattcatttgatcttcaatctctgataccctttcttccacttgatcaaattggctactgaagcttgtgcttgtgtcacgtagttcttgtaccatggttttcagctccatcaggtcctttaaggacttctctacactgtttattctagtcagccattcatctaatcttttctcaaggtttttagcttctttgcaatgggtttgaacatccttctttagctcagagaagtttgttattaccaatcatctgaagccttctactctcaacttgttaaagtcattctccatccagctttgttccattgctggcgaggagctgtgatcccttgaaggagacgaggtgctctgatttttagaattttcagcttttctgctcttgtttctccacatctttgtggttttatctacctttggtctttgatgatggtgacgtacagatggggttttggtgtggatgtccttcctgtttgttagttttccttctaacagtcaggaccctcagctgcaggtctgttggagtttgctggagatccactccagacctgtttgcctggttatcaccagcggaggctgcagaacagcaaatattgcagaacggcagatgttgctgcctgatccttcctctggaagcttcgtttctgaggggcacccagctgtatgaggtgtcagttagtccatactgggaagtatctcccagttaggctactcaggggtcagggacccacttgaggaggcagtctgtccattcttagatctcaaactctgtgctgggagaaccactactctcttcaaagctgtcagaaagggatgtttaagtctgcagaagtttctgctgccttctgttcagctatgccctgcccccagagatgaagtctacagaggcaggcaggcctccttgagctgtggtgggttccacccagttcgagcttcctggacactttgtttacctactcaagcctcagcaatagtggacgtccctcccctagcctcgctgctgccttgcagtttgatctcagactgctgtgctagcagtgagtgaggctcccaggaatgggatataatctcctggtgtgctgtttgctaaggccattggaaaagtgcagtattagggtgggagtgcccaattttccagatactgtctgtcatggcttccctttgctaggaaagggaattacctgactccttgcacttcccaggtgaggcaatgccctgccctgctccgtgggctgcacccactgtctgacgagccccagtgagatgaacccagtacctcagttggaaatgcagaaatcacccatcttctgtgtcactcatgctgggagctgcagactggagctcttcctgttcagccaccttggaaccaaagccttgaagtctttttgtgataaatttgacatctggtcatttgtttttattatactttaagttttagggtacatgtgcacaacgtgcaggttagttacatatgtatacatgtgccatgtttgtgtgctgcacccattagctcatcatttaacattaggtatatttcctaatgctatccctcccccctccccccaccccacaacaggccccagtgtgtgatgttccccttcctgtgtccatgtgttcccattgttcaattcccacctatgagtgagaacatgtggtgtttggttttctgtccttgccatagtttgctcagaatgatggtttccagcttcatccatgtccctacaaaggacctgaactcatcattttttatggctgcatagtattccatggtgtatatgagccacattttcttaattcagtctatcattgttggacatttgggttggttccaagtctttgctattgtgaatagtgcctcaataaacatacatgtgcatgtgtctttatagcagtgtgttttataatcctttgggtatatacccagtaatgggatggctgggtcaaatggtatttctagttctagatctctgaggaattgccacactgacttccacaatggttgaactagtttatggtcccaccaacagtgtaaaagcattcctatttctccacatcctctccagcacctgttgtttcctgacttttgaatgatcaccattctaactggtgtgagatggtatctcattgtggttttgatttgcatttctcttatggtcagttatgatgagcattttttcatgtgtcttttggctgcataaatgtcttcttttgagaagtgtctgtttgtatcctttgcccactttttgatggggttgttggtttttttcttgtaaattcgtttgagttcattgtagattctggatattagccctttgtcagatgagtagattgcaaaaattttctcccattctgtagtttgcctgttcattctgatggtagtttcttttgctgtgcagaagttctttagtttaattagatcccatttgtcaattttggcttttgttgccattgcttttggtgttttagacatgaagtccttgcccatgcctatgtcctgaatggtattgtctaggttttcttctagggtttttatgcttttaggtctaacatgtaagtctttaatccatcttgaattaatttttgtataaggcgtaaggaagggatccagtttcagctttctacatatggctagccagttttcccagcaccatttattagatagggaatcctttccccatttcttgtttttgtcaggttcgtcaaagatcagatagttgtagatatgtggcattatttctgagggctctgttctgttccattggtctatatctctgttttggtaccagtaccatgctgttttggttactgtagccttgtagtatagtttgaagtcaggtagcgtgatgcctccagctttgttcttttggcttaggattgacttggcaatgcaggctcttttttggtcccatatgaactttaaggtagttctttccaattctgtgaagaaagtcattggtagcttgatggggatggcattgaatctataaattaccttgggcagcatggccattttcatgatattgattcttcctacccatgagcataaaatgttcttccatttgtttgtatcctcttttatttcattgagcagtggtttgtagttctccttgaagaggtccttcacatcccttgtaagttggattcttaggtattttattctctttgaagcaattgcgaatgggagttcactcatgatctggctctctgtttgtctgttattggtgtataagaatgcttgtgatttttgcacattgattttgtatcctgagactttgctgaaattgcctatcagcttaaggagattttgggctgagatgatggggttttctagatatacagtcatgtcatctgcaaacagagacaatttgacttcctcttttcctaattgaatatcctttatttctttctcctgcctgattgccctggccagaacttccaacactatgttgaataggagtggtgagagacggcattccagtcttgtgccagttttcaaagggaatgcttccactttttgcccattcagtatgatattggttgtgggtttgtcatagatagctcttattattttgagatactttccatctgaagaaaatagagacacaaaaaacccttcaaaaaatcaatgaatccaggaggtggtttttggaaaagatcaacaaaattgatagaccactagcaagactaataaagaagaaaagagagaagaatcaaatagatacaataaaaaatgataaagcggatatcaccaccgatcccacagaagtacatactaccatcagagaatactataaacacctctacgcaaataaactagaaaatctagaagaaatggataaattcctggacacatacaccctcccaagactaaaccaggaagaagctgaatctctgaatagatcaataacaagctctgaaattgatgcaataattaatagcttaccaaccaaaaaaagtccaggaccagatggattcacagccgaattctaccagaggtacaaggaggagctgttaccatcctttctgaaactattccaatcaatagaaaaagagggaatcttccctaactcattttatgaggccagcatcatcctgataccaaagcctggcagaaacacaacaaaaaaagagaattttagaccaatatctctgatgaacatcgatgcaaaaatcctcaataaaatactggcaaaccgaacccagcagcacatcaaaaagcttatccaccatgatcaagttggcttcatccttgtgatgcaaggctggttcaacatatgcaaatcaataaacataatccatcatataaacagaaccaatgacaaaaaccatgattatctcactagatgcagaaaaggcctttgacaaaattcaacaacccttcatgctaaagacatctggtcattctcacaagcagtttctgttactcgttttttgttctggtgtatgtgttatacttttatgtttgctttgcaagttttaattttttgtaaactggacattttaagtaatatattgtagcaactctgcagattgatctttccccctttggggattttaaattattttcttgtttatttttttgatgactggctggattgttttaatgaagtctattgtctcccacctcccccagtatgaagcttctgatgtcactccttgggggctagggggaagccttggatatgactatagtcaccctgggttgatagtggctttggaaggactcactttgactgtgtcttccccagccaccccagcagacaatcaccactaatttccagctcattacttcttcattgtttttttaaaatttctttgaacataggtgggagtaaactgatccaataaatttggagtccctttgaagggatagttattgaggtcaatgtgtgagatttgttctgaccctaggaggtcctctcacttgtctttctccctgactctttctagcaaactaactggcctgtagtttagcatatatctccagtgattctgccaatctcctttcaattgccttttaccacaacttgcattgtttttgagcggtgtccttaggcttgaagtccataccatgttacaaatgatgtgtttctttgaaaaaagattcagagctcttttttatgtcttgctgcttcccctaggcaaaaatctgtcatccatggctctgaagctgagagttgaaacaatggtacacttctctctgcaggagagaagtttggtttgcctctcctggcttggatttgtgaactacaaatgagccagggtgagggtaatctaaaccgcagtattcccagcacatcacacttgcggtagagcttccaacccatgagtggggagtgggaagaggcagggacaacatccaacttctcagctgcactcacctggaagggagccttacaacagctagctgaaggcaaaatgagagatgctgatgtcctgtccatcccaagaagacagttttctgactgggggctggggaagatgcacacatctacagtggagtttccattttgctgagctgagaggaagaagggtgagagcagttggttcaaattccagagactcttgctgttgttactgaattttagtagattttcttgagtaactgatttttcatctgttgtatgctcttaatatcatttccagaagtgttaaatgattggatagtttttacgattttcatcagtttcaaaggggaatgagaatacagtttcttatgctatcatgacaaagtgtaactcaaagaaggatactttcttaaaagagcagctacaaaatttctacagttgacatcatacttaatggtgaaaaactgaatgctttctctctaacatgaggcataaggaggatgtaatctctcacagttcttattcaatctcataatggaagccagtgcaataaggcaagaaaaataaataaaaggcatatagactgaaaaggaagaaacagaacacctgtatttgtatacaatacaattacgtatatagaaaatcccagataatttacaaaaaaagcttctagcacaaataattgaatttagcaaggctgtagaatacaagctcaatatataaaaaccaaatatatttctttataccagcaatgtagaattgaaattcaaaatttaaaacagattaatcacagtacaaaacataaaatacttaggtgtaaatctaacaaaatatgtataggatctgtatgctgaaaaatataaaacactggggaagaaataaaagaagacctaaataagtggagagatatccattatcacaaattagaagattcagtattgttaagatgttaatcctccataaattgatctagagattaactccaaccctatttaaaatcccagcttttaaaaatagatattaacaagttgttcctaaaatttatatggaaaggcaaggaaactagaagagccaaaacaattgtgaaaaggacaaatctggaggactcacactacctgatttcaagacttactatagagctacagtaatcaagacaactatggataaaataatagtcaatggaacaatggaattgaatagagtccagaaatagacctacaaaatgtctttgacaaagatacaaaagaaattcaatggagaaggaataatcttttcaagaaattgtgtttgattggactttcctatgcaaagaagtgaaccttgatccaaacattacatttcatagaaaacaaacaaacaaacaaaaaacaaacaaacctgaaaatgaattacagatataaatgtaaaatgtgaaactataaaacttctataagaaaacatgggacaatatcttcaagactgtgaattaggcgaagttttagatatgacactaaaatcaggatccgtaaaaaaaaaaatcggactttattaacattaaaaactgttgctctggaatagtcacgttaagagaataaaaacaagacaaacattgggataaaatatctgcaaatcacatttatgacaaagaatttatgtcctatatacataagtaacttttaaagttcaacaagacactaaataacccagtttttacaatgagaaaaagatctaaatagataccttgccaaagaagatatacagatagcaaataggcagatgaaaagattcccaatgtccattagtcattaggaaagtacaaattaaaattataacaagatatcactataatcctattagaatggctaaaattaaaaaaatctgacaatactaagtgttgacaaggatgtagagtgactttaactctaatgtactgttcttgggactggtaaatattacaatcattgtggaagacagtttggaagtttcttatacagtttactataaccagcaatcccactcttactaaataaaatcttatgttcacatgaaaacctgtatgcaaattttaatagcaactttattcataacagccccaaactgaaaacaacacagatgtccttcaaccaaggaagaaataaacaaactggggtgcttccttgcaatggcataccactcagtaatgtaaaggagcaaactatctgtattagtcagggctctctagagggacagaactaataggatagataggtaaagggaagtttattaaggagtattgactcacacaatcacaaagtgaggtcccacaataggctgactgcaagctgaggcactaggaagccagtccgagtaccaaagctgaagaaattggagtctgatgtttgaaggcaggaagcatgcagcatgggagaaagatgtaggctgggagactcagccagtctagtcttttcatgttcttctgcctgcttttattctagctgtgctggcagctgattatgttgtgcccacccagattaagggtggatctgcctttcccagtccactgactcaaatgttaatctcctttggcaacactctcacagacacacccagggccaatacttacagccttcaatccaatcaagttaacactcaatattaactactgatacactactgatacacacagaaacatagatgactattacatacattgtgctaagtgaaagaagacagaatcaaaagatttcatatttgatgacaccatttatatgacattttgaaaagggcagaacaatagggatggagtcaggagtaggagttggaggaaaagatggattacaaagggtctgcatgaggaaattttggggtagtgggatgtatcatgactgtggtggtgaatacccgatgagttattttgtcaaaactcgtagagctcatcatggagtttaagttaaaaagcaaaaacaggatgtgggggagacaaaaaatgaaatgcaaactgcggtaaatgaacctaactgtactacagatgaatgacataagcacactaaaaaagtgggaaagaaaaaaaactgaacctaagttaccttgtaaaatattcaatgtttcactagataatgtaaagataaagagaaaaagaattgcacatgaatgcggtattctggttagtaaatttgtttctcatgggagtgcaagtttgcaattccgtaactacattatgtgtatagaaaagttgaacagataagtaagtgtattttagataatacaggccagatttctcactgttggaaaaagaaattataattaaggaaaggagaaggctagaatgaaccctgcattgatgaattggaatgagaggtatcagtatgaatttacttaaaaacaacaaacacatgggtggatggatggatggatgggtagatggatagatagacagacagatacagacataaatacaagtatgtgtatatgcatggagaagaatacattatatatttataagttctgtttgctgaggtggcctagaagcaatgacaccctagtgacaatgggtacacctaatgctctaaatttggtttctaagtatcattcttcaataaaaggaaccagagtgtcttttagaagtgtttgattctagtatggggtagggataatacaagatgaacctggagcatcttgtagtgccagaaagtcagaaattgcttaaaaaagaagagagcattttgaaaaggcccaagagccaacctcaaagaggccccaatggccaatactcaaacaacttgagcaacaaaataaatagtgacactattcagatataacccaataaaatacatatctatgtgtccatactggtataagtaaacaattgaatatacaaataaatagagagaaggtataactgttccttacagaagaatcctggttactgtaagtaaaagaaaagaaggaaatagaaatcatattaaacacagtaataattgttgcagataagatgcactgatgcatgttaaaattaggttagaagtttgagtagatacagaatatttgcacagtttcaaagtaactcccccaagatatgtattaataacaaaaggaaaaatcatgactttcaagtagagaaacttggaggacatcattcaaagtaaaaaagatggccaggtgcagtggctcacacctgtaaccgcagcactttgggaggccgaggcagatggatcacctgaggtcaggagtttgagtccagtctggctaaaatggtgaaaccccatctctactaaaaatacagaaattagttgggtgtggtggcaggcgcctataatcccagctacttgagaggctgagacaggtgaatttcttgaacccaggaggcacaggttgcagtgagctgagattgtgccattgcactccagtctgggcgacaagagtaaaactctgtctaaaaaaaacaaacaaaacaaaacaaacaaataaacaaacaaaaaaccaccaaagtaataaagattaacattgctgggtgtggtggctcatatctataaaacgagcactttggcaggccaaggtgggaggattacttgagcccagtagtttgagacctgcctgggctacagagtgagactctgactctacaactaaacaacaacaacaacaaaaatatctgggcgtggtggcatgcacctggaaccccagctacttgggaggctaaggcgggaggattgcttgagcttaggagtttgaggctgtagtgagctgtgattacactggagcctgggaaacagaacaagatcctgtctcaaagaataaaacaaaacaaaagattaacatcactgagagaaagacatatcaatatcatgaaaaccctaatccaatgtgctgagaaggacacatcatttctttaggtggcaacgaggctgtagtctccactgccaaaaactcactgagtggttgtggactaactgccactctctgggcctcagtctcctcatatgcattgaagaattggggtagataaaggagaggttttcaaataagttcgtttgatcctctgtttttgccaaggagtcttttcctctcaaataaaaacacaggacggagtggttctgaatctacataaaaatgtgtagcctggctggatgaggtggctcacatctgtaatctcagcactttgggaggctgaggcagggggactgcttaaggccagaagtttgagaccagcctgggcaacatagtgagactctgtctctgttaaaaaaaaacaacaacaaaaacacaaaaattggctgggcacagtgactcagacctgtaatcccagaactgtgggaggctgaggcaggcagatcaactgagcatagcagttcgagatcaccctgggcaacatggtgaaacccaatctctattaaaatacaaaaaaattagccagtcgtggtggcgagcacctgtagtcccagctacttgagaggccgaggcatgagaattgcttgagcctgggaggcggaggttgcagtgatctgatatcatgtcactgcactccagtttgggctacagggtgagactccatgtcaaaaaaaattttttttttaattagctgagcatggtggcatgcacctgtagtcccagctacttgggaggctgtggtgggaggatcccttgagcccaggaggtcaaagttacagtgagctatgattgtgccactggactccagccaggacagcagagagattttgtctcaaaataaataaataaaaaagcataacctaaagataacaagaaggaatatcaaacaaacccaactgaggcacagtttaaaatatacttgatcagtactttctaaaatgtcagggtcatgaaggacctcggaaagactgaggaactgtcacccattgagggagacaaaggaggcgtgatgacctaatgatcttggttggcccagctcagataattgtaattggtcatacaagatactaagctcaggggaatttttgcatctcttctgtaaggctatgattatttcaaaataaaaaattaaaaatacaacaaaaagtaatgagagagggagagatagaggtgtgagtacaaagagaaccaaaaagaaaagtggttttgggggctctatctcaaaaagaactgtgggcctcgttgtcggcaagtggagttgatgagaggcaagtagataagatgctgatctgtgtaatcccaacactttgggaggccgagacgggcagatcacgaggtcaggagattgagaccatcctggctaacacggtgaaacctcgtctccactaaaaatacaaaaaattagccggggtggtggcgggtgcctgtagtcccagctaccccggaggttgaggcaggagaatggcgtgaacctgggaggccgagcttgcagtgagccgagattgcaccactgcactccagcctgggcgacagagcaagacactgtctcaaaaaaaaaaaaagaagctgatctgttctgagtgaattatagtgccaaaagtattgtcagcctgtgctgttaagagagactgactgagtcttaaagtcacccttgggctcccagtgctgtatgggtaggaagcagctggacaacactggccagtcctccgggaggccatagtcccagtgcatgcctcagataagccagagaagaatcttccagatgacagagccagggtcagggagctactgccttggagcagaatcagagcccaatcagaggaaaaggttgtagggtactgagccgctaaaatgctttgctggcaggattttgggatagctgtgcacagttgttgcaggtaagatgcatttctgggctgggtgcagtggctcatgcctgtaatcccagcactttgggaggccgaggcgggcggatcacgaggtcaagagatcgagaccagcctggccaacatggtgaaaccccgtctctactaaaaatacaaaaattagctgggcgtggttgtctgcacctgtaatcccagttactcaggaggctgaggcaggagaatggcttgagcccgggaggcggaggttgcagtgagctgagatcagacctctgcactctagcccaggcaacagagcaaaactccgtctaaaaaaaaaaaaaaaggaaaaagatgtacttctgtgacttctctttgccctgcctctgaatgggagtgcttactgaaggtgtctagtctctgttccaccattctagagcaggtgcacattggggtgggcagtccaatcccttggcttatagcttcaagtctctggagcaagaggaactccattaaactggggcggaagtgtctgatatgtgtgagaagcaaaacatttaatgacgataagtgcagtctttgctagtgcttagcactgcacgtttctacatctgcttgtcctccttccagacacacagtacgattgcacttcctaccccctggaagtgaagcacggccacccgacttgctttggccaaagaaggtaaacattatggcttctgagtggaagtatttagttactggcacaagacttcccaatgctctccctgccactgtcaccgtgatggtccagaaggtgacagctcctcatctcggaagccagagtaaggacaacaaaaagcagagccctcactgatctgagatcaacatgtcatctaaatgtttggttttggttgtttaggttgggggctggttgtcaccatggcccatcctgatggaactcagtagtcaaggggagaatgtacgccaggcggggaaaccagagatgcccagcaccccccagaaagtcagatttccttaagcccagtctgggatgtgtcacctggctgctctggcaaggtaatgtggtttgatagctgttgagctattgttgtaatgtcgtaacgtatttcaatggccatttttctttttctttttcttttaagatggagactagctttgtcacccaggctggagtgcagtggcagaatctcagcaatagctgtttttctgttcttgagttgggagagacttagctctgtgaggctcaggagaagaggcctggttctaagaaaggttggccaggccttttcttccacagccattttgcttttaaattcagccttccgggcatgtaagaacaaccataagagcttcctaatctgtcagggaaggaaaggaccgctgcagtggctggaaagtggtgcacaccgccatgcgggtcatcggccttcgcatattgtttctgctgagtagtcctgagtacagagcccagaaacctggtttgagtcctcactgtccacaaactcattgagtggtctgggactgactccatgtacatatcctgtactttgggaaaaaatgagtgagagttttgaagtcaaactgctttgggttcaaattcctcaatctgctgtgaccttaaatgaagaaccttaagtcctgtctgcttccattttctcatctgtaatgtggacttcctagaataacaggaactggccagtagaactgggagaagtgagtgactaaatggatgaaaggcctgaacccggctcctggcaaggagaatgcattgatggtcagtagcatcttcatcatcttcatcatcatcatcactaccctgaccagatgggggtatttcacagtctttttttttgtttgtttgtttttgagatggggtcttgctctgtcatccagactggagtgcagtggcacgatctcggctcactgaaacctctgcctcctgagttcaagcgattctcctgcctcagctctcaagtagctggggttacagatgcctgccaccatgcccagctaatttttgtatttttaataaagatggaatttcaccatgttggccaggctggtctcaaactcctgacctcaggcgatccgcccgcctcggcctcccaaagtgctgggattacaggcatgcaccaccgtgcccagcctgtttcacagtctggtgtgaatataagatgcagatggctctgagtaacttgttcccaatcaccaccccacctaccctgtgtgcctcagagttccctgtgcctcagagttcctcgtgtgcctcagagttccctgtgcctcagagttcctcgctcaggaccagcgccaaaaaggaaattgacaaatatgtggtggattcaattggttaaatggctgatctccaaggtgtgtcccaaacaaaaccaacaacttcccaagctggtctcattcaacaatgttgctgaatgtggtagtgttcataaaattccaacacaagtagttccaaaaatgaaaaatacaccaccaaatgccaacaccacaccaaaaccaatggcaaataccaccccccttttttttttgagatggagttttgctcttgttgcccaggctggagtgcaatggcactatgtcagttcactgcaacctccacctcccaggttcaagcaactctccatcctcaccctcccaagtagctaggaatacaagcacctgccaccacacccagataatttttgtatttttaggagagatggggtttcaccacattggccgggctggtctccaactcctgacctcaggtgatctggctgcctaggcctcccaaagtgctgagattacaggtgtgagccaccacgccccaccagcaaataccctttaccctcatctgatctacatatgagtgaacaatcaattgatctgctgtatttcccacagcagatcattattctcatcagagtatagacataatccaggagtgctgtgtttcagtgtggccccgaaggagttaagtgaaataaagaatattatcaatattgtatcagtcacagatgagaaactgcataccaggatcagtgtaattcattcattggtttatggacaccgggtcctccagggactgtcacaaatccacttgatgttcctgagtgagagatttagcatttggatctttgatttagctgaaagatgtgtaaaaactcatgcagtcagacaactccctacaggcgattcatctctgttggcttttacgtaacagttattccaatcaagtgtcagcagtaacttaagctctgtaacttgcctctgaattcacatttgtgagatgctgggacatgaagaaacagtggcagggacaagaaggcccttctgggagaaggaagccttcttgctctttttgtttctttggaagtggcagacacacctggggagttagtgttctgagggaggaggcagcctctggcttctgaggctttggtcttgcatgaggtcttgtgtttcttgtgcagagtgccaggttggggtggtggggggagagcatgattcctgggagacaggggcactgagggtcctcagagcagctgttggggtcttacaggaacctcaggtccacagctgctccctggctagctcagcagggacggaagatctgaagacctgcatctgatcggttaacccaggtgagaggcataactctgaagttatgaccgtatggatagtgcttagcggtttcttctgccagaatttctcctgtgtccctcaccacagaggcctctgtcctgcactaagtctctttgatatctcatcacctgtgtcaaaagtgaagggaggagagaaggccaaggattgcttgtctcagtgcctccagagagagtgaaagtgcaagtggaggctggctgtggtggctcacgcctgtaatcccagcactttaggaggctgaggcaggaggatcacttgaggtcaggagttcgagaccagcctggccaagaaggccaaaccacatctctactaaaaatacaaaaattagtcgggtgtagtggtgcacacctataaccccagctactcgggaggcggaggcaggagaatcactggaatgtgggaggtggaggttgcagtgagccgagatcatgccattgcactccagcctgggtgacaaggtgagactctatctcaaaaaaaaaaaaaaaaaaggccgggcgcacggtggctcatgtctgtaatcccagcactttgggaggccgaggtgggcagatcatgaggccaggagatcaagaccatccttgccagcatgttgaaacaccatctctactaaaaatacaaaaattagctgggcatgttggtgcatgcctgttatcccagctactcaggaggctgaggcaggagaattgcttgaaccagggagtcagaggttgcagtgagcagagattgccccactgcactcaagcttggcgacagagcaagactccgtctcaagaaaaaaaaaagtgcaagtggactgttctgtggataatttaagatagataaataaagcaatgcaatggcctatccacatgaagtggcctccagtatcactgttattaacagatgatgtttaagatgtgtttggtgagtgctggcccatgttggagaaagcccttccgagaataaagcattcattcctcaagcaaacttgaaaagaaagctcatgaaccatccccattttatagagaaggaaactaaggtgtagagtggttcataaattgagtaaggtcatacggctggtaaaatggcaaagctggacttcgggaccgactctgttgacctccgatgcgatgctcacaaccactgtgttagctcagttttgtagcatggtggagagctatgccatctcacccatcaattgttgagggtgtttgcaggctggtgaaggggcagtcaggcatttccctgggtggagagtgggggcggctttccagcttcctgaggaagcaattcacaggcagttcagctgtgattatattacaggtaccagaggaggaacctgtggagacatctccaagcaaggaaactggcacaaggaccccatcatgctgggctctgagctggagggtccagagtaaggtgttgccaaatcccacattcaagttccctctcacagtcaatgcttgccttctagccagagaagaactggcggtgagaagcagacccactgaggcagtacaagaaattagccaggcagatgacagctctgaaggaaattacacagaaggcagcgcagaaagagctggaaaacacaaggcactgagatgcctacaggatgaagcgaaggtctttttgctgttgtttgtttggttttttgattttttttttttgagacagagttttgctcttatcaacaggctggagtgcaatgtcacaatctttgctcactgcaacatctgcctcctggattcaagcaattctcctgcctcagcctcccaagtagctgggattacaggcacccaacaccgcacccgactaatttttgtatttttagtagaaacggggtttcaccatgttgaccagtctggtctcgaactcctgacctcaggtgatctgccttggcctcccaaagtgttgggattacaggtgtgagccagcgtgcccggcccaaaggtcccttcttaatagaggttctagaaggatggaatggagaggagatgaaagtggcaatttctggagagattatggataagaattttccagacctgatgaaagacatgaatcttcagaatcaagaatcacagagttccaagcaggagatgaaaaataataaatccacaacaggatacatcacagtaaaacaacaacaatgacgacaaaaaaaaaagagaaaaacattagcctaggtcaaaagggtatttattaaagagacacgagggagtctttggggctctggggcatcgtcaggcagctgctgggacctcagtagactctgtgaccagtggcacagtgcttcctcttcagtgtcgtgttttctgtttcctactctaccctgggacttgagagtgtgcaagactgagcagccaacacctacaggggaaggcgggaatgaaacccagcaagaaaaggtccctccatccttggtggtggttctgccagcctcacccacacctttgatccagaggaggtggagcggaaagggacagggcctcagccacagcagacttgcatgcatttaccacttaccctttgaggaagagagccgggagtggtccaggaaagaagtctcctttttcttgtcaaatacccattaggtgagacggttgtgtaaagcccctggcacatagtacatgctcagtaaagccaagagaggcgtttgcttgagagcaggtactgtgcaccagcagtctctatgtgcgacagtcagttctcaccaggagctgcttgagagggaggttctatcatccctatcttacagagattgtctccttgctagtgaagcccacagaggtaccagaacatgaactcaggcagtccagtttcagagtggtcatgaaatttaactttttttttaaataaatggaatctcttctgtcacccagctggagtgaggtagcatggtcatagctcactgcagcctcaaactcttgagatcaagcagtcctcctgccttaccctcccaagtagatatgattacaggtgcataccacttggttactttatttgtagagatggggtcttgctacattggccaggctggtctcaaactccaggcttcaagtgatcctccacaccttggccttccaaagtgctgaggttacaggcatgagccactgcacccacatgaaattttaaatattttctaaaggaaccacagagctgtcaaactgtggaatagggtaagtgcataaaatgacattttggaaaaatgaatggggacgttttaattttacatccccagaattcaacccagccatgtgtagggaacacctaccgtgtgcataatctgctttcaatccgagggagtgacttcgggcacagcttgtccacaaggtcagcaagtggcaggggtgagggggtagtgaaagtgagcgctctcgtgcgatggggaagcccggagtcctgggtcctgcgtgcatttatctcctctgctggccccggggagctggggacagctcatatgcagtggcttcctcaggctccagtgttttaagagccctggcttgaagcagttccatttgggagagtttctccctagcatttggtatggaattattaccaaatgctagagaggaaccctgccaaatgctgtatatcagctaaaacccacactcctaaacaatgaaatatttataataaaaacagaccccggagaggggcacgggctggggcgctcagctgctgaggggctcatggctcaggtgttctgagtgggtcttgcctgctggtacaggtattgccgtcagggcagcacgcgccaggcagtgcggggtgtagctggaccaggtctagctcatgaagagaggagaaactgtgggtcttgccatcgcctcaagccccagaagacacagctgagcttcttcctccctagaagccctcctcccctcctcgtacagtgctcggcattcagcaggcactcaataaatgctgcctgcccgcaagcgtggatacttccagtaacagcaaaaccttgctcatcaggaacccacagggaatgggatccagacagctgagttttcgagagggagccgtaaattattttcatgtaacattttcagatggaaatatctctaagatgcggtgaacatttcccttccttcttgcttggagaatgtggaacaccattaacctttctgtaatggcccagggttgccgctgtgaacctccgctgctgagcgggaggtaatgcagccctccgggcttgcgaggtgtgctggggtgtttgccctctgctaatggcctctgttctcggagcttccttcagtctcacggccgatttcctagagatttttgagttcttccctcgccatcaggcctctagttgtcactgtcatcggtgtggtcatctctcccttcctaaattgccatttctaattggctgtggactagaaaccagaactctaggcttatgagagtgactgtgaagtcagcattcatctgctttgatgaagcatctgataggcctgagttaagggcagaaccttcaggctttgcagcccctgtgccggccatggagagtcattcttgtgtttctccttgatttacagccacagttcggaaaagggaggctacagcctgagaggtagctgctcttcatctgagttgcacagaaaaccctgaacacacttatcacccatctctaaattccctacggacaccagagcttgcaaactgtttcaagagaaccacactgcttatgatcttcaccttttaacaataaacaaagcacgttgactattgcttccctgtttggaagatcaggaaattgaggctgaggaagagatcacaggagactgattctatagcttggagccacccttaggtggggatttggttagagcctgaacaagtccagattccaggaggaacaagatgcatgggtaagtggtgcctgagggtgtctgaaacagggcatttacagcggtatgggcggggctgagggaaccgcagtggatggagagtctcaggggccagcaactcgggaggtcattctatccctctttgtgtccccagttatgagcacagggactccatatatggcaaggggaagggacagagtcctaggacatggagttccacgagggggcagcccacaggagtgaggtggtagccagaggagcccagacattcccataccatggcctgctgggggttaggtgggggaccccacactctctttcctccggccctccagcctcttgctggtacctcccattgctgcactgatcttcatgatcatgcctgaggacaaaggagtttggggttggagtctgcagacatccaagcggctcggcctcccggggcccagcgtggggcacaggaggagggaaagtagatcaggatgtacgcggaagaatcagcacagagcctgacatcagtgaggttgtcccacatcagcacaggctctgcagatgtttccctacggcttgccagctctgcccacgagcactcgtcctgccaggtgggatggctcggctgttggtgaacctgcaggcttggcagggcctctgagacacgtgccttatctccacggcagagaggcaaattgtgcgtaagtcctgctgtaagccttctagaccaagctggctgctcctcaccccttcttcctttccaacttagccctgcttagctggaaagatcaggcaggaggagggcagggtggagcagtgggaagtgcacacacgagcctggaaaacaggctcctggacctagccaggcccacctcttcctcgcatatcttccctgagctctcagtttctgcatcagtaaagtggaataatccatccccaggcttagttgttgtgagggggaaggagaaggaaggtgagggagcccttgatcaattctaagggactgtgcaagggagagatgctgagtttgaggttctcattgcctgaggaaggatttttttttttttttagatggagtcttgctctgtcgcccaggctggagtgcagtggcacaatcttggctcactgcaacctccgcctcccaattcaagtgattctcctgcctcagcctcctgagtagctggaattacaggtgtgtgccaccatgcccagctaatttttgtatttttagtagagatgaggtttcaccatgttggccaggctggtctcaaactcctgacctcaaatgatccacccgcctcaacctcccaaagtgctggggttacaggcgtgagccaccatgcctggcccccttctttccttctgcagagggaatgtattggtccattctcacactgctataaagaactacctgagactgggtaatttatgaagaaaagaggtttaattgactcacagttccacaggcttaacagggagcattattgggaggcctcaggaaacttacaatcatggtggaaggtgaaggggaagcaggcaccttcttctcatggtggcagaatagagagagagtgaagggggaaatgccacatacttttataccatcagatctcgtgagaactcactcactaccatgagaacagcaagggggaaatccgcccccatgagccaatcacctcccaccagacccctcctctaattccacatgagatttgggcggggacacaaatccaaaccatatcagggaggaagtcctatgggcctgtagggacttatcaggtgatcaggcgctgggctatggttgggattggagggtgggcagaacccggagagtggcctgagccagcccacccacctccagtgctcagcaggtggtggggggttccctcacaactctgtccaaagcacacctgggtcaggtgtttccctctctcccatgaaccgctctctgtcctaccttccccaaactggaaatataggtgtttcgttgatttaaaatatttgttccaaggcatggtggctcataactgtaatctcagttacttggaaggctgaggtgggaggatcacttgagcccagggatttgaggcttcagtgagctatgatgttgccaccacactccagcctaagtaacagagcaagactctgtctctgaaaacaacaacaacaaagtttgttaatatgcccattgtataaaatttagaagactctgaaatctatcaagaacaaaagttaaatcacgattaatcccaccatccagaaacaccattaatatgggggtgaatttcttcccatacctttgtttttgtatttttttgcatgtaaaatttacatgcataaataagtatgcatgatgcagttagagaaaagaggctgcaagggaactcacccacgtgttaatagtgattgtcctttggttaattcacagggaatgtcgtgggtcacatgcacgtcttcagaacgagcatatttatagatgcatgcataaaacaggcattgtgttgtcaataaagttttgtaccctgcttttttttgctttccccatctgctaggtctaattaaccaaataattttgatgactgtaggttttcccaaattctaaaaatcgtcgtctttcactggacactggtgttttgtggaatgtggtatgcattcgttcactcactcactcaagagccacacgctgagtccctgtgaggtggcagctctgtgctcactgctgaggacaccgagaggaaaagtcccgtccctgcccgtggagagctcctgctttaacgctaatggccaggctgaggccgtgcatagcagactttagcacgaggactcatggagtgtttcttgtccccacggggtgcagcccagagctggatgtgcaccacactggcgtgcagccttcactctccctgaccaatgcaaatccacccttctctctttcacaacatccatgtcttagatgatacttcgcacccaaaccctccacgtgcaggcagcctgccctccccctttctcccccaggaaagccctctcttggctggtgactacattcacaaggtcaaggactcgagttgttcatttcgtctttaaactcctggattgtgacttatttccggtctcccaggtgtgagattgattcttttttttttttttttttgagacggagtctcgctctgtggcccaggctggagtgcagtggcgcgatctccgctcactgcaagctccgcctcccgggttcacaccattctcctgcctcagcctcccgagtagctgggactacaggcgcccgccaccacgcccggctaattttttgtatttttagtagagacggggtttcaccatgttagccaggatggtctcgatctcctgacctcgtgatccgcccacctcagcctcccaaagtgctgggattacaggcgtgagccaccgcgcccggccgagattgattcttaaaggtaatcttttaaatgttttcctctgggactcggcttccagaatctcagttctgatgtgttgcttttcgtaatgtaacaggacacattcttagacggggtgggagagccagcgacagaattcgtctggcaaacgttgtcttatcctgggtttatccaggtgtgcagctctgtagccactgtgtgctgctgaggcgacacttcctcccggggcacagtgggaaatgtgttcctcctgtcctctatggtagatgcttctcactaagcctgggacttccaagtggcagagacatatcttctatcgttagaaaaccctcacttgcttatgtactcagcctaaagcccaggtaggttagaacagaaacatctgagggtatcgtgcaagccctcagctcagaacattgtatctgggccgggcgtggtggctcatgcctgtaatcccagcactttgggaggccaaggcaggaggatcacttgaggtcgggagttcgagaccagcctggcaaacatggtgaaaccctgtctgtactaaaaatacaaaaattagctaggcgtggtggtgggtgcctataatcccagctacttgggaggctgaggcaggagaatcgcttgaacccgggaggcggaggttgcagtgagccgagattgtgccactgcactccagcctgggcgatagagtgagactcagtctcaaaaaacaaaccaacaaacaaaaaacaaaccaacaaacaaaaaacaaaccaaaaaacccaaaatcaaaacaacaacaagaaaacattgcatctagcttcctggggtgactgggtgggtttcattcacagtccgggcatcacagccatggcagcagatggttgcttgtaaaggcagtgttgtgggggtacattcaggggggatgtagccataacctaattttgggggttaacttcttttgttttttgagacagagtcttgctctgttgcccaggctgaagtgcagtggcatgatctcggctcactgcaatctctgactcctgcttcaagctattctcgtgcctcagcctcccaagtagctaggattacagttatgtgccaccatgccttgctaatttttgtatttttagtagacatggattttcaccatgttggccagactggtccctaactcctgacctcaagtgatctgcctgcctcggcctcctaatgttgggttaacttctaactactctagtgattcagctgattgctgctgctagaaagctggactttttcttacattagcaactgtgtttccaccagtcaggatcaggaaggccaacttccctgctgtacttgtgaaaagatgaataagtaattcataaaatatctgtccatagcccaataggcattccacagagatgacagaagacaggcaaaggggcaagagggagcccagatgcaatgcagtccccaaatcaagttcccttttgtaaagtgcgtcacctgcaaatgcctattgtgaaagagaaagcgcatcacccatgctgtgggttcctgactcaggctgatggggaaagccaaagccatttgtgacaaaagctaggtgacaggggtaagccactggtttgggagtttgcagtgaggccattctgaacctgcaaaaccagatctgacagtctaaacgatttactaacaggaagtgctccggatgctgtgatggacttctgtatttacgttgaatgagttgaatgaatgtcataggcagaaagaactgctcactagggggccgggacagaggctgatggagattcccgttagccaggtgtggagcggagcctccagggcttgccaggtatgctggaaacagaacaccacacaaacatctctacagccctgaagtgcaaagctaaataacatgggacattatgaaaacgactgtcattcttatttaatttagaaaatccacataaaacatgtacacatcatgaataagaatagtaaaggcctattatgtaccaggtgccatgctaagggctaatccactgagttctctaaacacgctcttttttcttatgtggaggttaaggcacagagaggttatgtaacttgcctaaggtcacacagctctaaaattttggagctgggatttgaacccaggtggtctggcctcagaacctgtgctctgctgctttatggtattctcctccccttctcttttagagcaatagaaaaatcaccaccattggcaaaagtaactcgaggagttagcaaggggtgaggggtctggggagatctagaagcagagcttctgagtgggcagcaggcaggggagttggagccctagaatgactatatcaggaatattggctggacacatacctcccttggatacacagcccatctggagctaaagcaaagagatacattgttttatttgaagccagcaaggttcagtgggcactgagagacatccctggggttccctagagctgaagggtgagccggggacaacaagaacctgttgaaaatggcaccaccatcagaattaaaagtccaactaatttggagcaatagtgactgcctaaggtttatcatcctcttatgagtctgtaaggtaagccataaagcctcctgtgcataaatgggcaaaaggctggaggagacacaggaagagaaacaaattgggaagaacaagttggggcagcctttttggaaagaaagttggcagcatctaggaggggccccaaaaccttcatatgcaccgatccaacttcacctctgtcagtggattctaagaaaacaagcagagacgcaaacaaagctttaaccatgaaaatgctctctccaatacttctaagagaacaacaacaacaacaacaacaaaatagaaacaatttagatgctccaaaataagaggttgtttaaataaattatgttgcatccatttgatggaacattatgtagctataaaatcatgttttcaaagaatatttaatgacatggggagataccttgtgctacaaggttagagaacaaaagcaggacacaaaattgtttataaaaatgattcaaagtttgcaaaaaattgatatgcacagaaaaatgctcggaaggaaagatacaaaaggctatcagggtgagattaagaaagatataatcatctttgtacattcctgtgttttctaattattcttcaatgtgcatcaaggactactttatatcagagaaaagaaccattaattttaaagtgttgcaactaatttctagtggtggcaacacattttaagcaatgctgttcatatgtgcattcattcattcattcattcattcattcattcattcattcagtggtcagtgtaggtaaagtgcttaaaacagtgcctagccggttgcagtgaaccgagactgcacattgcactccagcctgggagacagagtgacgctccgtctcaaaaaataaaaaaacagaacaaacaaacaaaaaaatcccacaaaaaaacaacaaacaaaaataagtgcctggcacatagtatgaattatttaagtgttagatatgattcattaatttcttttttttctttttttagaggcagatatcttactgcgtcatccaggctgtagagcagtggtgagatcacagctcactgcagccttgaactcgtgggctcaagcaatcctcctacctcagcctcctgagaagctgggactacaggcgagtgccaccagacccagataattattattatttttattttttttagagacagggtcaagctatgatgcccagactggtctcaaattcctggcctcaagagatcctcctgcctcagtattagtttcttgattagttccatcaacatttcctaatgatctgcatggtgccagggattgggctaggcctagggtctggtgatgaaccatgtttggggtctgccctctgagaagtttcgagtcttggttagaaaggaagctcccacaagcaaagtcttagatggcatccccgaaacagcaactgtagccaaggtagttccacagatctggaccctcagagctagaagaggaccagaaaagctggcatggatacaaccatatctcaaacactcacccagatgaaaaaatttgtcttcggtcaccaatgcagtttcatacttaccctcctatacctttaggggccagaccccaagtctccatctgctagctgatcatcccaagtacaggttgcaaggaccccctgggggattttgtagggcccatgggatctacagcactcaggaaccttgggtgcaagtgcagattcagcctgccagagactctccagggatacaagctcagcccttggggccgcccctcccatttcccctacaccgcaccatccaattgcattttactcctctcttggagcctggcaccatcaacatgcatttgaccttcagcacatatctctttgctccgaggcttccctttctctttcccccaaatccaccagactcgactaagccctttggtggaatcaggatttaaaacaaagcctctatagtgatggtccttccctggctcctggcccaccacccaccctgagctccagtctgttccctgtacaggcccatggccagctctccatggaagcgggctgtgacacagggctctcaggcactggccagggtcagggacttgctttttgcctgactttttcattttcatttgttttcaagttgctacctggtagagaaatgcttcctacaaggcgataaagctccgtatttacccgtgtaagtcccggggattgttactggtgattctgttcaatccatacagaccaggtcacatctatgagccaaagggtaactgtaaccttttccaaaaaactatattttataaatatttgctccctttcatttgtagtggcaagcaaaatttgcacttcttccccaggtaaaaccagggctgaaaattgggactttggaaaagcaaggggccaggtcacagccatgtgctgcatgatgcgcacatttacagcatgggaaagggagtaccagagaaatcaacatcttaagaaaataagttctgggatccccaccatcagtttcgtctcataacctgatattttgtttcagttacaattcagtacaactgaattgtagtctcaacagccccccaaatttagaacttactatgggctatttcattgatttctcctcttcaggaaaacaaagcacaggccacattctggtcagaaagtccgctagcttcataacatttcccccaaacctaattcaaaaccgatgatagctgttgaagacaactgcagggcccagagttgatggtccaggatctattcaggacatttctgttccacagccttgcaaaggagtgggtgtgtgaggttgtaattatactcaatagacctcagcacattttttgttgttgttgttgagacagagtctcactttgtcactcaggctgaagtgcagtggtacaatcttggctcactgcaacatccacctctggggttcaagcgattctcctgcctcggcctcctgagtagttggaattacaggcacacaccactatgcctggctaatttttgtatttttcgtagagatggggtttcaccatgttggtcaggctggtctcaaactcctgatctcatgatctgcccgcctcggccttccaaagtgctaggattacaggcgtgagacaccgcgcccagccgctcagcacatttttttttgcatttgactaactcatacaaagacaccaagaagacatccacattggtcctgctttacaataaagcctgatgtaggaaaattaggattataaataaattactgttaatttgttattttaggacacgcccattcattttacaaatgacattgtctgttgagatgccttaaataaccagctcttccagtgcaatcaggttcaatttacaaaaatttactttataagcatctcttctggcacagagctattaatgcaaagcaaggtgcacctgtagctttaagagaattctggtaagttctttgcccattcactggaaagaacaccagggaccatgctttgcttttctgccccttgttccagccttgtttttgagcgctctggtccctggcccaggtgttctttgttcttgtcaggtgctaactattatcagatctcattctgtggcaaatagcagaaaacccaaagtaaactgaattaagttaaaggaagtttatccacttacaaaacagaaaggtgctggggtggagctggcttcaaatgtggctggattcagggctcatacaaggcaagcagcaccatttctctatctccatcctgccacggactgtgttggcacccttctctggctcctcttggtggcccctgaaaactctggactctgttcttttggtgctgggatggaaactacagttctccagcagtttaacctctccactagcacctagcaaaaaaaaaaaaaaaaaaaaaaagtccaagattcactctgattggaccaacttaggccatatgcctattactgaatgacagaatccagagagatgtgatgcactgattgcctgggatccggggcaggacccccacccagatgcccgcaaggcaggaagggaaggtgaagctgttgctggaggaagggacatgttccgccaggacaacacgaatcactatgctgacttcttccctctgttggaaaaaccggaagaggtgtacaaccttttcttgagcttgtggggcagcagcaccctgggtctgggaccaacaggtcatggcagaatagccaaacagatcagatgcttccccaatttcttcttattcaggaatcacctccacctctaagggcacccttctgaatcatgctctcagggagtctttgaagggtcattcatactgcattgctcatgacagaaaaggctgcaccttggccttggtggagagacaaatgacccctgcagcatagaaaaccctttttcctagtgcaggacaactccttgctgaagccaggtagccttcctcccagtaaaggatggtcgcctactcccctgagatggaaaagcagggttctccatgggaggccacctgggaccctgtggccatgcagaccaactccccacctaacacatgggccctttgcagacctagcgtctttcttctgcttgaagaagggagtcataacctggggattaggggtatcattgtgctaaaaccactgactgtgagtgatcaaaggggtattacagatgttggaggtcatctttatatagatggaaaaactgaggttccagaggagagggaacttggcctcttgattcagaagtgtcctggtccacccttccatcctggagccaatgtagccctcttgggtaccctccctgctgcttttaaatctgtctatacagcaagtcctcacttaatattgttgatggattcttggaaactgactttaagcaagtgatgtataatgaaactagttttaccatagattgattgatacaaacaagagttaagttcctacagcatgtctctggtcacaaagcttcaccgcgcttctacatgtctaaacattgaaataaatatgagctatacatacatttaagagccattaataaaacaagtaagatcattacttaccccagtttttgatcaattagtgagggtggtcatagtagtaatgggttaagtcaaagaatacatgtttgcaaagtgaaaattgtaaggagtacctctcaccaccaccaagttgaaaaacaaaaaatcacaaatatggtggactcaaaatatgtgcagtcgaaagtgcacaactatgagcacttttgtactgtactgtttcttggcatacattagtatgattatcatatattttatgtattttatttgacaataatttatattcattcattgtttcatgttccagcctgatgattccagttcaccatctcaaggggctggagcctgtcttagcaactcagggtgcagggcaggaaccagccctggacaggatgccatctcattgcagggaacactcatacatatacctacactccctcgggttggcaccatgcagacatggctattcacctaccgtgcatgtctttggggcatgggaggaaacgtgagtacccagagacaacccacgcagacctgggaagaacgtacacagtccgcacagatagtggccctggctggaatccatgtttttttctcattacattataaggaaacaatgttgaaggaaacaatattataagaagacctggtgtactatgaaggaggcaggattataaggagcagaagagagtgaagggaaaagaatagcaatatacaaacaaacaaacaaaatgagtagtgttgtgaccaggagtgcaactccaaagtaatggtttgataacattttatgaatcactgccatgtttgaggcgcgaatgacagaggtcagaacaaacctattggtgtgatcagtatcactttcaaagtaggcactttgagtgattgaacgcttcttataaggagctgatgggctccagcctggtgcagcgcttcccagccttgcttttgagctggtccaggagtcaccaaagaactcatttcaccaccttgatttttacccacagccaccacccacctaactcatcatcccaagttcccagtaactttcatcagtttcaagaaattaaatggcgggagtggccttgaggattccgcaggagtggaaggcccgggtcaacgtcccctgggtagggaggggctgcccttagagacagcttcgagtactgaagagtgcaggactcttgggcaggggaggggtgggcccatgggagcctctgccgaaaatccaaggggttccagccctggccaggcgaggcaggggcagcgagaaatactcgagagtttgaaaaggaagagcagagagaggccagacccaagggaggaagatggggaccccgagaaatcctggatacggggaaaagcataggagagccacaaattatgaaagcggccacaaaacacccctggtggggtggggctggtgggtggggagccagtggggaacttttatactttaatgagacgcaggtaggcgtcaagtttcggcatctggaggataaggggcctctgtccattttctggaaccctccacctcccactcccaacaagggccgcgccgggaggtctccccggggacccccactcagcttgctcaggtcctggaggcatgcagagggcgtcggcgccgacagggggagccggagagccccctgcccggccgtctgcggggctcaggcggggcttggcctccgatgagcgcgctgtctctgcccggtgggtcccaccccgcccggccacgcaaagccgtggcagccccctcgcggcagcgcgccccaggcgaagcaccccgggccaccgggagcgcggccctcccgagacgcacgggctccgaggccgcagaagccttgggcctccaggcctggaaggggctcccctggcctggaggccatgggcccggcccagaccggccagacaccgccagggacccccagaacgacgccaggacgcgcgccgggctccgtgcctcccacggcccaggcgaggccggcggctcgagggttaaaaggcgacccccattctgtaggggagaaagtgccttttctccaagtccatatggtcacttcctttcgacctgctcggccctgctcgcctctttgtccgctctgtcacttataaagaatcacttgacttacaataacaggttcaaaagacgacggagtataatcagttgatccacgaagaattggaataaagaacaccccaccgctcaggctatcattcccatagagatagtgatatcattcatgtgattgcgatgctaatttctatacaagaaaaaaaaaacccttgtattttggtatttgttcaaagagaatttcagacacatcagattggaaaatgtgggctgaattcctaaacttttttgggtaggcagagaattttttaaaaacaccactgcagagatttgagcggattttaagaatctcctggaactagcttgttggaggaaagtgattatttcctcactcctccagtgcactcctggcgagagagagagagagagagagagagagagagagaagagagagagagagagagggagagagagcagcagcaaggagcgctgggttctcagggcagggtccgaggatgctggcagcggcaaggcccggtgcccgccgacggcgcgcctggggagaggaccaccggcggtgagggcccaggcccagcgcccagggcagctgcgacgcgtccgtctccaacgccggcacgctaacccagcgctcctcccagcgcaaagttttctgtgtctctcccctcactcttggactggttgcttgccaccgaatgactccttcagctggagaggggtggtgatggggaggctgtggcatgccttttctgtatctttgcttttgatgtcttgtgatgcccgggtttaaaacccgtcagtcatcttgggggagctcagttcgggcaggctggagcaagtcttacctgaatcaatgttttaagtgcccctgtggcttggcgttttgaataatcaatctgtctccatcacttcttaatcatgcgcaacacaggcctctctctctctttctctccccccacctcgctctccctccctgtatcctttttttttttttttttgtcaactcttttggatcctgtctctttgctattaacatgcccagtgtcacatgcgaggcttttctttaaaacaagcccctcattggtgtatctggatacttcttttattattattattactgaatcttttttcccataatgacaccaggatcattatataatcccataacaaagaggctttttgaggcaccagcttttgtcaactctaggacagagaatccataattgcattatccagctttttcctccttcttcccccctcctagcttcccagaaaaccaacctcatgccccactcacacccccaccttgttacttctgcttatattatttaccgaaacgtttgcccagaggacccgccttgcaaagttgccttaaaaaagttattttgtttgataattaagtcctggagcccatcgcatgatgattattctacacccataaggcagagaacctgcgtgacgtttttctcgaagtttaattaccgtatgctaatttccttgcctactacgtgattaattaaaatcatattttcataatcatttggcactagtattgttttagaattatcatgatctcctaaatagtgtctgtaaataaagtcgcctctaatggcaggcgcgggaggcgaggctgaggacctctccgcgtttgtatcgcggcgattggcaacataactgccttatttacattaaatacgccacaaggttacagcgcggatcaacgtcatttgatcgctgatgactcccttaaacgcccgggctgtgactgattcttcgcgtcccgctgtccaccgagattcacccgggagtttttttttttttttttttttttcctcccagaaaagaaacagactttaaatagtttcaggagcaggtaagaattacgctttttcctcgccccttctccgtctctctctcctctctctccgtggcagtctctctctccctctcggctggataaaaaattctttagtcaaaggcaggaatgcaaagtagtgacaaggaaggggctgatatatgtctcagtaacgagtctgacaatcagaatgtagctcttggagaatagatagattttaataagtgtgtttacatgagctcaaggtcagaaccaagctgcgctgtgttaaatggtttcttagttgctagacagagagaaaaaatggacgatcacacaccattctttgtagattattatatcaagggttcagtctctggctcatcaaagctaaatgccgcaagacctatctagttgctgtgaattatgccagggcgacaatggagagcgtttttaatggtacaatgcatttcacctaccagatagggggaggccgagccggggatggggatgtctgctggggctgggtgatgagtatcaatgaacggggcgattctgaaaagaggctgatgaaaatcgagcccgccctgccccggctgggctgggaacagttcgcagggctctgccgagtgggcgagtgaggcgcgcgagcagggcgcccgtcccccctcagccccggaaaatgatcaagtcaatcgtgtgggcatgtttcattattcattgaacacaatcttttacaacgctccgtttacgtgcccgagtttgctcctgacgcccgcgtttcaatgtttaaggtaaggaaaacaaaggtgggggggggatcgcggggcgcggcgcggtgcggggggcgcggcgcgggggggcggcggcgggtgggggggcagcttcggcgtccgggaggtggcaaagtgagtttggactcttggcgcggcccccccgtcccctccccctccccatctcggcgaggcctgccgcccggttccttctcgccccatcgcgattaaaaaatacggtctaattaaatatccgtggctgtgacgttggcgagagaagctgtcagcgggtggggggtggggggaaagaagaggaaaaccgagccggcggctgcggccgggcatcgtatggcgctagagaacttcggcggcgagcgggacctgcgcctgggccgccgcctccccgcccgcggtcccgggaccgttactttgaaaaggagtcccgaggcctggcgcccggcgcgcgatcgggaccccgcgtccagctccggggacccggccggcgccccccacccgcgagcggcccgcgagccactctcaggccccgggaaactttcaagagggtctggggggtggggggagtaaaaaggggagggggtaggctggggccgcggaaacttctgctcaagtgactttccccattttctcctctgcctgggacgggggttcgccttgcgctctttctctggtccgcgctcactgcggggttccggcccctccgcccgtggagagagggtaatttgcaaccttttttttttttcaattaaagttagctgatgcttacaatgtgtcaaacttgcgggcgccgagagccgctgagatctgccattttgtgattgcatcggcctcctgtgccccgggagcctggccaggctgaggccggagagttggtttcagggctgaggtgccagggtccgaacccgcgaccccaggaaaggccgtggcgcctgcaagcgcaggcggcgcccgcagcacctgccccagccgggcctcggcctgggggcccagccgggggccaaagaggaaataaataaataaataagtaacaggttatggagggaaaagagccggccagtcccaggctggagaaatgaggccaatcagagcgaggaagtgcgggcgtgggggctctggaaggcagaggagaggcagggcttgcgcggcgtctgggaagagtgcaatctggggggacgcctcccgtccccccagcgcagatgcatgactggggtaggaatgatctttgctgataagcctttttctgtttgcttcaagacattatttttcgaagatgaattgaggaaaacagtcgtaggcgagactcggggtgtattttaggcaaaaaaaaaaaagttagggttgggggagagctttcctttgatgagtaggaaagtgtccagatctcgacgcgcccatctgttgcagttttgcaaataatttaaaatatagatatctccatatagacggatgtatgtgaagtggaggaaggtcgaaacgcggggaagttagggaaaaagaaagaaaaagggctgggcagagagagacctgtgttgctcactcttcactctgcggagtgaactccggcagggctttctttggggacaggtggaaagttaagtcccccccttttcacttctgtattgtgagtggttcctactgtgtgcctgttggagaacatgtccaccgttcccgagttaggtggaggattggaatgttggggggcggggagcgttggagttgaggacgcagtggccaggggctgggggccgagaaagagcagggcggggtctcagccccgcgtgcgggtggcagcggcggccgggttttgtttgccagatattgttatgtctaacgggtgcctcgccggagacgtgatttgtcagccgccttcgttttcactttagcagaaaatacggcagctgcgaggtgtcccggcctgcggggctcgggcacccggtgcgtcctgggggctgggtcgtgtgcgcgggtgggagccggcggccggcggggccggggcgaggggcgagcgggaggggcggagtgagcgagcgcgcggtacggccctccggttcctcctgcgccttctcccggcagccgccgccgccgccgccgccgctgtgcaatttagcagaaatccgacaggggccgcgtttgctgagcgcatccggcggccgggcagcccgagcgggccgccgggcctggtcggccggtgtagaggcgcggagggggccggcggaggggaccggcggggatgggcgcgggaagcacgcctgaccagagcacgcgccgttccccaaccctggtgtccccggcgagttgggcagccccgcgcgccctgaccttgacgccccagtctccagccagggcttaggtgaacttggggtggggtgtgcgtgcgtgcgtgtgtatgtgcgtgcgtgtgtgtgtgtggaaggggtggtgagactgggaacgcgctgttttctttcccagtttgatactagcaactggatttttactttaagaccggctttgctctctgctggggttgggagggggggcgatcttttcccatcactcacatctttgttcattgttcactgagtggaaggcaggcgacttaaagagacgaaagagaggaaaaaggggtgagagacggagagaggaaaaagaggggggcggccagaagagggaaggagaggcgtggggacagggcccccgcccccgccggggtcgggtttgatggtgaaatagtaaacccacgcacggagggtcgccaggaaagtggacattaccgctttaattaacttcgagatgctccggcggcgggacctggcgtagccgtgacgcgcccccataaatctgcccggcccggggctgctccgagaactcgtacagtagcggcgtcagatccatcccgcgcctcccagtccggagtccatttgcataattggattttttttttttgcctccttctttctccctgaaacttgtttgaaaacccaagtgaaaaccgcgacgatctgcacactcaaaagcaagtgccaagtaagtgccctgcggtggcctcggcgcgccccggggtgagcgcgcaaagccgggagcgaggtgccgcgagctgcgcgccgccccgggccggcctcgcgtgtgggcggctgggcggctgggcggcgggaggacggcctccgcgggctccgggactgcccggctggctgctcgcacaactttttttttttcccccgtctgctgacttttcgggccaggtgaagtgtttgggccacgcgtgtacctgtggcgagactcgggaggcgatcttggggggcgcgcggtcgcagttgggcatcttgcctgggtcgggggcgggcagtcggtcccagtggccgccgctgagggcagagctgcgagcgagcggggccggctgctggtcgcgccgcgccgtaaatgcaagcctgtagccaaatgcttcccccattattctaaggtttgtgtctgcgtgtgcgtgtatgtatgtgtgtgtttgcgctgtgcttttaaacagaaagaaaagcaaccaaaacaagagcaggaagggctttttccttagctcgtcccccttcccccagcatcatttatttcttttgcttgaaggagagtgcagaccttctttgctaaagacagggtcaccgagagattgacaattctgttggaaatgccatcaatcctatagcgaaaatgtagctgcatttataaaataccaacccttgcctgataaggaaagtggtttcacagtgtctcaaattttattgaaaatatgtaatattattataatgattatttacagcgttcagaacccaggggaaaagtcgatttgcttgggggaagactagaaccctagttcttgtttgccggccagcctgggaacttgcctggggctgcgcccaccaccctgaaagctgctgcgggtggtggggggggctcagctttcagtccagggagtcgcagggggtcgcccctgcagccctctggcctctgctcggggagagcccagggcttctggctgaaggctgctttagttatgatgtcattctgatagcggagtgcaaatgtctcctgattccaccattaaccgcctggctgatttgcttggtaatgatagcactgacgtcctgctccctgacaaatgcagaaccgccgagccctaggaattaacttttccccccactgaggagaaacccggctgccagaagtctcagcactgggcctctgcctgtggactttgtctgcctcagtcccagacactgacatacatgacaggcccctgggctgagggacccgttttcccaaagtttagaaaacttttaagactttcatttccagaagacccttaatctggtcaaacttaagtgcgattgtgaccaggcagagatatttgcatgtgaccaatggcagggactctgagaccattgcatggaagacttgcctcctaccttcagccccttaactgtgtcttcatgttaatatcactgcaagtcagccggatttagtgttgatttttaactagtgtacaatgatttaagatttcttttgatttactgttcaaatgaaatttacataaatgtgatgaaaatgaacttaacatctgggcatatgaaaaaaggttagtacctcatatgtcatctgcagggaaagtctctaaaatgctttcaccctaaactgggtttggggaaacagttcctggagacataaatggtaattatggagaacctggagaaaacactttcaataaatttgcattcttttggactagagctctgaaagcccatcttgttctgtgcctggagtggttaacttctgagcaggctggagatcttcgcaactcagcaacttaactgctggccgggctgtcttcacggaagacttagggcaggcagggagcgacagtcacgctgttctggtccaagtcagaggccaataacccccattatgggagaggacagagaggcagctagaaggtgccgcccgacttcccacagttgcccatagggtactgaaggcagtgctgagatgtggaatcattgcccactgaaccccaaagagctgaatgattaggtttgtttgctttgccttaggtaaccaaagaaatttccatcagctccacgagcccattcaagtgaactctgaactccatcttacttttgagcaagagaagcttatctctggcatcaggaaatcagaattaaacagccttccccaaatgtggttgccttttgctcaaaagttggctgtgaatggcacaggtgtttttaaagtgccttgaatggagggggaagaaagacagcaatgatactcatgagaatatagatgaactttttttttttttttataagaagagtatcataaaagaagaaagcaaatagatttatttttccaggctgaatgaggacaattatagctttttaacatctttggatttagtgtttttaataagccttttaagtaagctgaaatatcagcttgcattttgttctcaacattatttaaagtgagacttgatgcaaatttaaaaacaagtgagttttctgcaggtcaacatttgtccatatgaaggagagaagcctcttccatggcctgtctgccaggacctagggcaggccagtgctcagccctgcctcagcctatctccaagtgaggccttagatttcggctggaaggacaggggtggtcaggtggcatctctcaggctgtgaaggctggattttggaatctaaaagcagggcacaaactcgcttgcattgctactagtggggccttgtgagtggaggggcttcctctgaactcacacctgctgtgcacactggcaccttctccagaatgtgccagggcagggtctgggctgaggctgtggaggagttggagggaagggagcagggccaatggggaggagtgggagggaggtctctgtctgcctggttgggctcacctgtgtgcttcatgtggtacctgctcgggagttggaagggaggccttttgccaaggagagggattggttgttcaggtctagactcttcaggctgccgtgatggtccccttggtggcattgaacgtccttagaggagtgagcagataatgtgtgtggtcagaatgcgctaagccagggagtggccccctaggttgtgctggtgatggtggtggtggtgatgtgtgtgtgtgtgtgtgtctgtctgtctgtgtgtgctggggaagggtgctgcctgttagaaatacttgttctgagatgatttccttttcatccacaattgtactatccaggatagactggtgagtttgtaatgtacatgtgtgttggaggggttggggtggaaataaatgaagaaatcaggaaatacaaaagaaaatgcatcttcagaatagagatgctaggaaacacagtccagttttctgaaatccccctcactttttttttttcccaaaagaaggcaaacatggatggaagccccctcaggaaggtgggctgtgcgggaagccatctggcccacctggggtgggcgtgggggcctcccccggccagttgatgccatcaacgggctcctgttgactgtgcctggtgataagggctgctgtggctgcttctgctggctccctgagagtctcctctcagcttctgatttttaaaaaataatttttcaacttttattttagcttcagggggtacatgtgcagggttgctatatgggtacattgtgtgatgctgaggtctggggtacaatgcatcccgtcacccaggtagtgagcatggcacccagtagtttctcagcccttctgccccgcctttctcccccctctagtgtcccccagtatccattgttgccatctttatattaatgtgtacccaatctttagcttccacttatacatgagaacatgctgtatttggttttctgttcctgcgttaattcgcttaggataatgagctttcacttttaaaaatcactgtagatctctggtctttctcttacagtggagtttttgctactataagcagcatcaagcacttggcttttcacatgctctgagcttgctcgaggtggggtttattttccctaagagacaagattcagatgagagtgaggtttgggtggaacttaacagatgaacctgggcatcatttctccagctcagggcactcgtgggagtccgtgctgtgcgttgtaggatgtttgggagcgtccccagcttctaccccactagatgccagtagcaccccccagctatgataatcaaaaatgtctccagacatttctatatctcccttggggagaatcaagcttatttcccacactttatgcgctgggccttgtcttgggcctcttcaggggggtggaaggtcagctgtggtcctacctttggggactgcacaagctggtggggagacagacaaatcccagtgccctgtaagtccagggggttggactgtgcactaaacaggggaagacccatggggtctgagagggcagagaacttccacatggatgaattgtatctgagcaaaggcatggggcccagctctgactgcttagaggtcaattgcacatggaggtggtgtcgggggttggggcggggggagaaccccatccctggcccctgactgtgacatgcaaactaagcagtggaaagcatagttcttaggctctgagtgagttgaggctgggcactttgctggcaggataatgatacctttttttttttttttaactttaagagatggagccttgctctgtcatccaggctgaagtgcagtggtgcaatcacggctcactgtagcctcgtcctgggttcaagagatcctcccactttagcctcctgagtagctgggactacaggtacataccaccacacctaggtagtttttaacatttttttttttttagagatggggtcttgctatgttgcccaggctggttgcaaacccctggcctcaggcagtcctcccacctcagcctaccaaagtgttgggattacaggcatgaggcagtgcacctggctgtccatttttgagtatttgctatgtgtaaggcacagctcctagtgctttacaccttccttatgatgcaggtactatatatgtccagaattcaggaaggaaaactgaggcaatgggaggggtaggtggtgggtctaggattagacccatcctttatgcctctggagttggcatgcttagctcatctactgctgcaaagcatctcccgtgacccacgttcagctgccctttctggggccagatttacagcaggacctctgtgatttgctcctgattctcaaagctcatccaccacaccctgacaccaggcttgggggctggtagggccaaagcaagcactctttggggtggaccaaagcctccaggtaggtggtggcaggaaggcaatgttgatgcttcaaatgcatgaagagatgcaggaaggaaagtcagtctataaggttccccctttcctctacctactattcttagtctatggctttccaatgagaaaattaagtgctgttatgacacaggagaaatgatcaccgtaggcttgagctgacattaacctgaaagttttctatctaggcattacagctttgattacctgagctgtgttcagttgggtctttgattacctaggtgggcctggctcctggggagtatatttctggccccctacctccttgctggctcttcagctggatgctgggaggccacctctccactgctgactctatttgtctatttgggaccactaggctccttcctttttttttttttttttttttttgagacagagtcttactctgtccccaggctggagtgcagtggtgcaatcttggctcactgcaacctctgcctcccaggttcaaggggtcctcccgcctcagcctctcaagttgctgggattacaagcatgtgccaccacacctggctaatttttgtgtttttagtagagacagggtttcaccatgttagccaggctggtctcaaactcctgacctcaggtgatccacctgcctcagcctcccaaagtgctaggattaaaggcatgagccaatgtgcctggcctcctttacattttttaggctttttgttgctttattactaaattacacacacacacacacacacacacacacacgcgcacacgcaccccacaccacgaagtagctttacttaggttgtgaaagcccacctaaaatcgagattaatcacagaaatgcccattcagccttaattataatgatggtctggcttgcatttctgagattccctcataattcccataaatttgaaggagagtttggttcatgcaagtaccagatcgtaggaccctcgggaggtggtattaattcagcagacattcctgcttgtggtttccaggtacaggaggaagggaaggtttggggctcttcggtgtaggtatggagaggtggccacaacattgacacctgcagtggccactattgggtggtgaccccatgccaggcactacattacacaccccgggtgcattatcttgcttagttcttttaatgccccagggaagggcctcccttggggcagcttccgcagtgggcaaactgaggggtgtaggaacttgttgctgcccatgcctgtggcatggccgagcgggcattggaagccagctgcattggcccaggaggcgcgtgtctcagccttgtttgcactcctgcctccctaaactgtccttagcactgagaacaaaatcatccttctgaataatgttaacccgccttgaaaaggaaagttaaaaatgtcaaccggaacttgctactttgagaacatatacattgttgtgaatttgttattaagagggagaaaatatttggaaatgctatgtcagctaacaagtaactatagagacagcaaacagatcacagcccacatagatattacatataaaatttaatctctttgaatagcttgatatttaattttatcttctgaaatatctagaaacacttatcccttattgactagagaaaaaaagtagcttacacaatttttgtgtgtggttattttcccaaaattttaattcccgattaaaatctatttaaatcaaatcaggcaatgtcttccaaattattatggaaaggccgtcatttatatgaagcctattgaaggggctgggaagtcttactgcaattagagctaaagtgctttaattattttgcttccccggccagggcccccagttttggggttgtaatctgttgatgccaagtggctatttcagcagccttaaatctgcaccgagcagagagcgtctcacggatagaacatggctggatctgttcattaaactcagtgcatggattccacagcatcagagaaactttattccccaacgtttccacccgaaagagggtcaatgctggtgggtgggcagtccccctccaacagcccaagaagagttcaaaaggtggaaaagtggtagtgtgggaatgcgaggaggaagaaaagcggccacatgccggcatgaaaggatttaatctgcgcagccgaaacctcctctgatagtggagggcttgcttctgtgctggtcttggcaaagccactctctcactgagtcctgccgccgccgggtactgaggacttgcatgtagctgggaacagtctgaagccacagcctgcctggagctctcatggacattgcatgcaccatttcttaagcaaaaagccagacactccatctgcaattctttttagagatcattggtttgacaacttcatatttattttccgtgtgatttttgttttgttttgtttcagcccccccaccccacccatttccttctttttggctttttcaccctgtgtgtacacattcatcctgaaagtattttgaaaaagcttttgttaaagttggggcggggggggggtacaattggaattttagttccatttaaaatttccatctattttgaaggcagaagaagtacagacaagataacatgaacatttccatcatctaaaaatggattaaggctgcaaggtagcaattttcccctttaataactactgccaccccaagaagacacagtggctttcttagtaggtgacaaacgattagctcagccagggtctggtcatctggttggcattccccatgacagtgccctgggatgtaacggatggtgatatggcttgtcctttggaggggggtggtagggatgtgtatgcccggcatgttggcatgtttgttctttggcgatggctgtctggtgaggtcaagtaatatattccagatattagagtatgtgccatcttccaaatgcttcctgaagaactggttgcattttgacattctgctcctttgtctcactgacaccagcaacttgatcctcacgtctcaaaatgttgacaggagctagattcttgtgagatttttttttttttcttctaggcactgcctggctaaggagcctggccactcaggtgaaaaataccaggcccctgtgtggatctgggggacagcaggagtctgttgttaagaaaactttttctccctttgcatgataatattgctcagatgaaaatcacacaatttttgtgtgatctccaaataccaccttcaataaaataatttgttcattgatctgaagaatgagtggtttccagctgcttccttccccgggacagactttcgcattggaatctgtctctttgactcacttctggtagaggttggcctcccgtggaggccattgtgaaagggccaggcagcctggggaggctggggatggagcccttgtttctctaggaatcagagggcttagcagaatcaaacacaaaatcataatatgataatttgagcttaaacgtgaaggtatttatgatcactgatcttcatctcaaaggtaggcgagtggaattcttgctggactgtgggggccaaggcgaccctccttttactaatctctatcatcaacggactcttaaccttcagagtaacatgaggaaactttgtgtatcttttcactgactgtatcattgatcctgaaggaggagagtctaaaggaggattctttgtgtgcattttgtttgctaattaaattgtttttgcaagagttacacagtccatgtgtgttgcttgatacatccatatctataagttctttttttttttgcataatttaacttttagggttgcttcctctctcaataagatgcttatttcattgagctggaaacatcaagtttgtaaatgaggaagagctggaggcatctttttgttttgttttaaagcagtgtaacaccatgataaagagctcaggaccagtcagatggcaccaagtttgccatccagcctcaccacttgcaagctgtttgtaagcagcgcattttgatctttgagcctcagttttctcatcagtagaactggactaattctttctccctcataaggtcatcaggattaaaagagaaaatgattaaggagcccagagaccagctattcaatgaatggccagctactcttattacttgtgtaatacatgttgttgaatattttagaaatagaagccccaccaaaggctgtgggcttcagtcatctgcagagccgggtgaagaagtgccattcctccttccttcctggctggtctttggggtgatgtacctgggaatccaataactattggctgattgatttcctatgtatctgaagatgcattttaaagggtcagctgagttatggaggggtctggggtctaagtcttcactaaacaaatattctcactccaatccatcaaatgttagtaccatgtatctaggccacacacacacacacacacacacacacaatcacacatgaaaacacatacatgcacacaagtgtactggttggttgctggattcctggtagggacattataaactgtgctttccatcttttccctacagccaaagctaaagatcacaaggaggtcccttcattcctttctttcttccgtcttttcctccctccctccctttctcccttcttcctccttccttcctatctgtctctctatctatctgtctgtctgtctgtctgtctagatatataaagtgtatcctaggtaggatcggcactgtgaatgagaacagaaatgctttgaaaccattgcatcaacacaatagcaaaatgaaagcagtgatgttctcctagtttccatgttccaaattaaaaaaaaaatatatatatacacacacatacacatatacataccagagactcccctaatttgcatactggtgtatattcaagtgttgatttcaaagcagcctaacacttaagcatgaagtataaaattaatgagttgaacctgtgaccactgcattcaagaagagtcacccaagagagaggtggggagtcgaacagagctcctttactttctcccacagaggaaaaggtggaattctgggctggctttccctcaccagagggtatcccaaatctatgacaaaagaaaaatgccagtctcttttggaaagtagggaatgccctagtgatgctgtatgaagaagcaagcctccatcttccccggggaaatttgaaaccaagatggggtcctgtcaatgaccctctagcatttattgagtgcctattagacaggtggccttgggctttgaaatgcaatatcttatttaacttaattctgagaacactctctgtcttttgatggagaaagcgaggcttatccatggtggtgtgacttgcccaaggccaagctgctggtaggtagcagtgctgggctccgtctgaacggaacctatgtcagtgacatgtaggttgcatgcccttcagactgggactcttggcacgtggcctggaccttctctgcaaacggggtttcctagaacagacatggcggttggagaatcgacagtcatgagacagacacacttgttgtagttgcaaagattctaccatactcactccttggaccctaaagggggagacttgtcctgtgcatttctgagcatgggaattattttgcttcttaaaatgcaattaagtcaaaggcctgggaattagagcagaagccaacatcccatcctctgctggtgggtgaggaatgcttcttcccatgctcaataggcatctcctatattcccagggcacccttgcctttcctgtccctaccccgcatctcattcttctttcaggcatcagtccaaatccgtcttgctccatgaagctgtatttgaacacctatccatgccaaaaagagcgcacaccacgatgccatgtgaggcaaggttgcctttcatctgctctcacccttggggttttgggatccaatcctctccagacttgtcagctagccttctatggagacatcagggaggtgtacctggactttatccctacttatcatttgtgagttattaacccaaaccagatgcaaaggtgtcgacattggttgtgttgtaagaattctgaggggccgggcatggtggctcacacctgtaatcctaacactttgagaggccgaggcgagcagatctgttgaggtcaggagatcgacaccagcctggccaacatgatgaaaccccatctgtactaaaaatacaaaaaaaaattagccaggcatggtggcgggtgcctgtaatcccagctacttgggaggctggggcaggagaattgctcaaacccgggaggcagaggttgcagtgagccaagatcgtgtcactacactccagcctgggtgacagagcaagactctatctcagaaaaaaaaaaaatccaaggaactggctttgctgggccagtttctggtctccagaaccccaaggggactgtatctcttcaagggaataggttgaggggtatctgggcccctcccaggaccttgtcccagggcagctcccagctgcaggttgctctgcctgggaggaggcccaggagtgccatcgcattgctgcactggcctgacctcccactggcccgcacatgaactgttccagagacaatacctagctttctaggggcagcctggaagaacccccgagcagctgggctaaacaggctctgagagggaagcattgctagcaggccatatagcaaggagggcttcgtggaccgtctcctgaagggtatgaggtacttaggcctcagtccttaaatattagttgaatagatgaacaagaagtgaagggcacagtgtttggtggacggaacagcaagaatacaggtgtgacagtaggaactgctgcggcaatctgggaacagcacttgggaaggacattgctgtggggaacctgctagagaggctttgagatttggaactgtttggggtcctggggacataacagtgaacaaaccgattcatatctgggctctcatggagcttccattctggtgggagggaactggaaataaacaaataattcaggcctggggcagtggctcacacctttaatcccagcactttgggaggttgaggtgggaggatcactggagcccaggagttcaagatcagcctgggcagcatagtgagaccccatctctacaaataataaaaaaattagctgggtgtggtggtgcatgcttgtagtccaagctcttcaggaggctgaggtgggaggatcacttgaacccagttcgagcctacagtgaacagtgattgtgccactgcactccagcctaggtgacacggcgagaccctgtctcaaaaacagaaacaaaaacgaaacccaaataattcaaatacattgtatatcagatggtgacatgtgttatggagagaaatgaaacagggtatgaggatacagcagaatgggagtgggggtggctgtaatgtcacaccagtcgggcaggaagcctcactgagaagctggcatctgcgcctggacttggcggtggataccaggatgagagcactccaggctaagggaagggcaagtgcagagcctctgagacaggactgtgctaggtctgtctaaggagcagcagtgtggctggagtaaaaaagggatggagagagttaaactagcagagcccatggggagcgggcttcctatctcctctctcactgcactctgggcagcaccaccaggctctgcagatctttgctgagtgtctgctatgtgccaggcacctggacctgacccctgtgattcgtgctgctctagagagacacggaagtatatgcgccatttcaaccgtgcccacgaagactaggaagggagagaactgagggctgtggggacacctcctcacctgggtagtcagtggtgtcctctgggaggactcagggtgagaagaagtcagcagagaacaaggtagggaagagttccaggcagagggaatggcctatgcaaaggccctaaggttggaaagatcttggtggcgcgatctttctttgcatggggaaggggacatctagttggggctgccctctctgctgtgagcgcctgttgaggggtaattcctgtgggagggcatccatgggccactgtggtcttctctgcctgatgccctctcctgccgtccaaagtcaatatcttccttccaagtggcccttccctcttgccctccttctattcttcttcctaggcaaatatctactagacatttactctgtaccaggccctcagagaagtgagaagataaagttagctacaaagacaaaaatgatcaagctgtctcacagggtagttcctgttggggttcacaagggagtctgtgatgcctggctcccctctgcttcccggtcggctacccccagctttagggggtatccgttcacagttatttttgtatggcagcattgggttagacttggttgtgcttcacgcagtctaaagggtgggagggtccatcatgagtgtcacaacagtattttgggttcctctttcctacgcatggctgcagtggtgttccgtattccctccatccttttccatccatgaccaggaaatctccacaaagcagggtccctgcccccaaggggatttgtactttacttaggacctgaccctttgaggaggttcttactccccatccccaactcttcatcacaaagacctatccctttcgagagagggacaggttggcaggaaaaccagatccttgttggtatcgcctgtaggatcacatgggatgttttgatttgatgttgaacttgaaagtacatctcatgcctggccttccgattcgttacttaaattattacaatgttaactttttaattttattcttattatgttttttggtggaaaatgaaatatgtcctggctgtttggatactgaactttttttttctcattattaggttttaaatggttaagtaaatttcattaaataactgtaaacattccaaagagtcctgcatacatatcgtatttcacatcatcgtaacttagatgcaaaatattaaaatgtaaatgactcaatagaaaaattatggaaacaaatgtatgacttttattacacttttggaaaagttgcttaaatatttctccttccttcgcaaaaatctatgatgagttaaaggaaaaaaatattttaagacactataaaaaacaattcttaagaataaagcaacagaccttgtggaacagctttttttttctaattttatctgttcaactctgtgaatatatgttggcaattgtccactcattaatttgattattttaaagtaagctatataaacatgaatataattattgtaaatttaaaacattagttagaacaatattgttcccaagtacataatagatagaggtctaaattttggtatcatgcattatgaaatttgaaccaacagttctttttcctccgaggaaatattgcagtctgtagtaagaattgtctgggaaacatttggtattttattttagtctctatcacaaatttccatgtgattgttctatattaatcatgaaaactgacacgagattccttttccataataaatagcaagtaatgtaataaaaacaaatgataacgctaatgaaaaaattatatttttccccaacttagagaagagttccaacaataggtaggataaaataaaatcaatattttgacagtgctagtgctgtattacgtctggctcattaatttggagacaacttctctgttcaatcccaaatcacaaagtgtcaacaaatagtagttttaacatctactctcattccaatgcatttaatgctttgcaagttatttttagcagaaaatgatttttttgattctgcagatgtatagagattgcattgtgtaggtttttgtcttggggaacaatgaaaaacttttgccattgcaatttgtattcaagagatagttcattataaattccagttcagcacaatcctatatactttttcctatatatatttacatatatgaatatgtgtgtgtatacactcttaaaggccatgttcattcctgttcattaattttatgcaaagttttccttagcttcgtcttcttttagaagaatctacagtttctgatttccaagtaccgattgtcagttgattaaggtcaatgctagcacttattcaggctcttattgactggggccacgtgatagatgtgattgatcggctttagacacaggattgctcatttcccattgtaacactcctttccacctgacccatccctcattaccccgagttcttcatagagtctttaagaacgatccacccccccacccctcaggtgctgtgctgttacattaaggccaaattccatctctcacttgtgcaaaaatatatgggtatcactgctgcctgtcttcctttgttttccagggatcacaaaagcctgggatttagaatagcagataataacatacagtgcatattattgatgctgctttaattgtcttattgacaactcacttgaacttggagaagcatgctaatatttatcatcctgtgaactcatgtgcattttctctactcaagccataattacagaagaatttcgaaactcagatgtctgcctgctgcactgcctcaccttccctgtgtttggacaaaggcttccagaccactgcattgccagctgtctttgctccttgcccctgaagcttttagcaccctctggatgcttctccctctaggggagatctggctaattaacactttgaccagcgtctggccaggatcggggtggcgatgtgacccacctgaggagttgcaaggagggcagcatttgggttgcctagtggttttttgttttttccaagagacagctgtttcttacctttaggaaatgccaatggaacacattagaaagatttagaacaggctgaagctagaattgaggccactgtcctggctaggagacaaaagtccacttaaggagggtttgacaggcttaagtcaatggatggagccatcaccatctaactcatgtctacctagctgtccccatctgccacccatgccaccccatccaccaggcttcagcctcactggtctcctttcaggtcctcggacacacaggctccatcccacttgagggccatagcacacctgtttcctctgcatgggaccccctcatcctcaccttttacctggctgccccagcacaatgctcaggtcccactcaagtggcacatcttcagggaggccattcctgtcctcttctatcctatcccagtcacctgctgtcttgtccttttctgttgtctgcacagtgcttatcttcattgactttattgattgtttgcacacttacccatctccttccctccacaggactagactccccaaagccagggcccctaacagtctcctgaggtctctactcccagcacccagagcagcgacttgcaaatggcagtccattaataaatatgttttgtaagaatgttactttcctaaaagaaaatataaatttaggagtgtgtccttgaccctttgagaacaatgacatgtcatgaaacagactgtcccatgacgcatcctttgttccattgttagagatggaagtcacagctgtgactctctcccagcccaccacgaggtcgccgtgatggaagtgcagaaagaaggttgtctctctattgaaaatatattagcgttattgccaagttgttctccctttgtaggggcactggcttaatcaagggcgcatgttatgatagggacaggcttaatcaagggtgtttattctggcttgggttttggcctcgggggccttttctctgaaggtatttccccgcctataccacttggtctgaggttggccacgcagtccctgctgcaggcctcttgcttgacatcagtacgttgggcacggagcgttggagtcaggttctttgtcgctgctgagagccagctgtgtggagccctgattaacacagataaagttgttagtcgctctgtgttcttgtctttggcagtgcttgatgtgggtccctgggcagaggcgtcgtggagacgagagaagatgctgccccggccccctgattggtgagccgctcatctgactgatgagtgaggtggagtaaccccactggcttcaacgagacactcgaatcacagaggatgattgcagaagggggaaaggactttaaacctatgtcacaccctgttgccccagtgactcctgtcttggggagcttacgatgcttgtgcaactgaagaatctgttttctgagagtgttgggattgtattgctcgcgtatttctccccacaagtcaacaacaaacgagaattcttgcagaaaaataaaagacggtaggaatcagagagggaaagaagtctcgattttctcccgtctgtctcatagaatccttctgcggcatcaaatgttttccttttatccatattatttctttactagttaaatagaaatatcctttccctgtgcacatatttcctctcaagtagactgcaagcttcctgggagcagaattgttctttttcttcccatagtgtgccactgccttgccagctacacactgcccccgtccccaccccacaagaggtctggcactcgagggtgggcggtttgggatgcgtgaggaaagtaataaaaccttaatgagtaacagaagtgaatgaagagtgtgggtctttggaaaatatttagaatgatctcctgttgaattgttcatcatttatagacctcttgggctaaaaactatttgctgtctagcggtagccaaggctagcttttttctttttcaattcaatgagtaaaaaagtcgactcattattattatattttttaaataaggaccctaagagtctaccagggatatttgaagacactattattcaaagccagacattttgggagtgaaattctcatcatgaatgggttccttgatgtagaaactaagaaatcccttggcgttgtgattcttggtgatgacctattgttacttgcttccaattaaggaagggagtcccacgtcccctgggttcttccagctttccgctggggtttgggcattgcctcactggtgtctgcctcccaacctctcttccccagtgtgttcaagtctccagcttcctgttccactatgacttcagctgtttgatggtgtgaatgaaaataagatatgtattcaagggcacccccggtgtgcccccattgtaggccaggtgacagttcatagtcaaacacagggtggaggcagaaatcccaggtcctggcctttgcttggtgattcacttgggtactttattacctacatgggatctgtttccccgtctgtaacacaggggaggtgtgcaagagaccaagagcaggttgaagaatcattagggatgcttgtcaggcatgccggttcctgagctccacctggagaggcagctttgcagggggtgctgttgtccatggactccacactggtccaggtaacccttcccagttcttctctgatgggttacacctcgaacctggagacatggttaaacatccacagctgggcgtggtggatcaagcctgtaatcccagcactttgggaagtgggaagatggattgagcctaggagtggagccaggagttcaaggccagcctgggcaacatcgcaagagcccgtctctacagaaaattaaaaaaaattagctggtgtggtggtatacacctttagtcccagctacttgggagactgaggtgagaggatggcttgaactcaggaggttgaggctgtagtgagctgtgatcaagacactgcactccagtctgcgtgacagagtgagatgctgtctcactgtcacttacagaaaattataagtaaataaacattagcaaaccttatttattgcctccttggttttctccagattgtctcaattagtgacatttaaccaaatcagagagtatttcacgccacaatcacagaggcaattctagacccttatctcctgagaccctgtcaccttacggtgcagacagcggcatcaggaagtgaaccgacctggccctgttcacaaaagagccacatgtacagcgtccactgaatctctgcattcgaattcaaaccaatagaaaatagcagaagacaacaaggaaatgactgattggtcaaaagccttgtctgtgattttaagaacttgtagctttgaagatttctttttctttctttctttctttttcttttctttctttttttttttttttgcgacagagtctttctctgtcaaccaggctggagtgctgtggcataatcttggctcaccgcaacctctgcctcctgggctcctgggtccaagtgattctcatgcctcagcctcccaaggtgctgggattacagacacctgccaccatgccctgctaatttttttttttttttttttgtagttttagtagagatggagtttcactgtgttggccaggctcgtctcgcacttctggcctcaagtaatctacccacccgcacctcccaaattgctgagattgcaggggtgagccactgtgcccaaccagaatcttcagatttctatctggtgaagttggggagatgttcttgaaaggtatagctgcagtgagcatgtgtgattggaaagagacttctaaccttttatcttatgaactgcccatcccatatgagttagaaattctctcataactccctaatggaaccagtgggacaacatgttattagtactgttccaggtatgtctggcttttgaccttggccagcagtggttctgaggaatgattatttctgatgcctactagatttcatcttttaacaaggaagacccttgagtatgtctactccttccttttgtctttttagcacccctcccccagaagttgggtgacattttaaggaggaaggacaagtcactactgtgtgcagatttcatatcagatacaagaactccacttgctgccaaacgggggtttaacctctcccagatccttggttgtgcataattaatgcgtcgttcagcatttgacttttgtgcctttcatacagatttgatcttaaaggatgcctgtggagaagttctgtgctcacaaaagcaccttccatgtatttcatggcttttgcttttgagttttggggagaccctttcttgagttttcctaaagaaggtgatctgtatggatacaatacacaatctctcttaaattattcagcaactatttatccagtgcctagcactgtgtttccaaatggttggaaatgaatggctgcaatatagttactattactaacactaatgttagtattagtcttagtattataatataaacaggaaaagaaggagaaggaggagaaggaggagggggagggggacaaggaggagggggaggaggaggaggatattttaacacgcccttgtggcatgagttctataggtaacttcccttgcattgtttttttactgaatcttcagcagtcctgtgagatggggtcatcagtttgattttccaaacaaaatatctggggctcagagcaccaaatgacttaccaaaaaacacatgcaaaaaggatcacttgagcctgggagttcgaggcttcagtgagccctgactgcaccccaccttgggtgatggagcgagaccctgtcccaaaacaaaaacaaaacaaagcaaaaccaaaaacccacattcagagcaagtggctgagttcaggtggaaaccccccaccctgcctcatcgaacctctctttgccactgtgctgtgttgctgtggccaagctattgcctttttggggaatggaggtggaaggctgaagggaccattcatgaagtcaccaggctctagtgggaaagtgtctagccaagagatagctgcaaacctagttcccatttatgcccactgttgagaatgcttggggacatcctttaaatggtttctctctgggcaaaggcagcactccctgaatctgccctcttgccaagtagaggagatgtaagaacatgttttctattgatttttaaaagcaattcaggacccaactggtaataatcggtgtgacctgtgctgttctccaggcagtcacaagcagctcggagccttgttgtgtgactctgatgtttgggatgtgcattctttgaagattacttctaaagcaaggagtccaaatccttaattcacgattctgtctattcctgtggtgtttacattccaccatggcagaagatcactgtgaaaaagaaagatgaaaatgcacttttaagaagggcttttcttgtgcgggcctcctccaaagaccctaaccctttcccctcttgttgacgccgaggtctgtgtttcatctacagggaacatatacattaataggtgatttaaagctttgtcacactgtggtgacacatgcaggctgagctcttggggcaatgagctgcgtggagcaagtgctggtgtgatttcgggtgttggggcaggtctctctggcatcgtgtgtctgtcaaagggctgtctgcccttttgctgaagtcgggtctgcaagggtcttggggaaagtggctggtgaggctgattgatttgaccagtgagcagagcaggaccttgctagggctgggcactaagagagagatgagtcttctacttagagaagtcgctgagctttggaatctgagagctgagtaatgtgcagacacagggtctgggaagaccccttgattccctaaacactaagacaactacgattcctcttctgtctataccactccccccatatgattcaaaaggcaccataaaggcataacatatacaaggaccaagttagttctgatttttccaatgatgactgttttgatgcctgttgggttttttttttttttgagggggacagatatcaagtgtcaaatactttaaaaatagaattcctttttttaaaaagtggtattattgcttcctcatttttgaggagtttccaaagcacatatggtctgtccatgatgttacacggggtttaggtttaagatctcggtgaacttgatacccatgacccggtctacaaagaacatgtggggtctgtctgcttccctctatccctgcagtcagcaacaccaaggatactcaagactccctatcatcggtggggaataagccaccaggccacctgatcacagagcactccctggatgcacttgagtgtctgggttccagataggcgtggttctacataagactgtgtgtctacattttctggggccaacgagaaaccatttctgatgctatttgggccacccatctagtagattaatgtggacaatgatgaaatgatggttcacaggtggaacctgagatgcactctcaattcccatatggatggttggtgtgggtgcaaatggccttaggaaaagagccaggcttttgcattggtcagagcactgactttttctataatgtgttgaagggggagcaggaactcactagtgttcctgctgatggttcccagggccctttaaaaacagcctccttaatatgttgctgcctgttcaaggcatcgtgtggccttgaaatttaaaaacatcatatagtaaattcgtctacttctttaaaaaattttacttccataagtttttgggaacaggtggtgtttggttacatgagtaagttgtttagtggtgatttgtgagattttggtgcgcccatctcctgagcagtacacactgcacacaatttgtagtcttttattcctcactcacttcctaccctttccccctgagtccccaaggtccattgtgccattcttatgcctttgcatcctcatagcttagctcccacttatgagtgagaacatacaatgtttggttttccattcctgagttacttcacttagactaatagtcttcaatcccatccaggttgctgtgaatgccatttattcattcctttttgtggctgagtagtattccattgcacatatatatatatagaaaagagcttttgcacagcaaaaaggtcagcaaagtaaacagacaacccacagagtgggagaaaatcctcacaatctatacatctgacaaaggactaatatccagaatctacaatgaactcaaacaaattagcaagagaaaaacaaacaatcccaacaaaaagtggcctaaggacatgaatagatgattctcaaaagaagatatacaaatagctaacaaacttatgaaaaaatgctcaacatcactaatgattagggaaatgcaaatcaaaaccgcaatgcaataccaccctactcctgcaagaatgaccataataaaaaaacttccactttaaaaaatatcttctattctccatagggaatactccctggaattcttgttggccctggctggctgtggctggggaccgcactcctagtctccccagggggatctggtgcctccgggggagctggagaagcctctggaggttggaaggccagggtgcataccctgggatgaggcaggaggatttaccctccatctacctcaggtcaacagcattcctgtgatgcgaatggaccctgggtcttttactgtgttttctgcccacctgtatgccatagcccgagagacacctgcctaccatttttttgagtgagtggatatgaccactagacatctgtgcctgcggccatcagcaatccagcataaagttaccccctaaaatgggaatctttgcctgcctaatggagtggcgaaggtgctgagctgggttggagaccaagattagatccactgtctaattctcagtagattgattctccattagatcccagatagatgagcttggtagttctaaagcattttttgtacctatgtaggaatggcagaagggacggattccccactgtaggaatatttaggacatatcttgttattttaaaaagtggctgtgattctcataaaacaaattccattttaactccatttattttgtagggctttaaagaaggtagagaatgtttcgaaatgctgatgatgatggtgatggtgatggtgatgagcagtagcgaggtgaaaagatttggaatcagtttctgaagtgggcacccacaatgctcattccagttggaaccatcaccctttaggcaaatctttaccccttggaagctctcagattatcagcctcctaaccgcagggagaccctcctagtcaaatgtggagagggatcctagctggtgtttccagagggcagtgtgaatgataaatactgttcatattcagaaggaaaaattgattttaaaaatgtgcctttgattcactaatctctgacattgagacattttttgaagtctgttgctataattagaattctataagccatttcatgtctctatcaaaattttaagagacatagaaaatttaaggttttttttggcttacaattcatcatatcaatgcgaatcttattgcagtttgggcttcagtgtggagcagtatttcggggccagagacacgcgttctgtcatcagggctgtgttgagagcagcccctgtgctgcccaacaacgcacagcttgaattttaagaattgcttgtgaattgtgtttctgccttgttttgatttgtttttcccagccaaaatgtggggctggaggcaggagactgtgtcattcagaatctgtgcctgcttccccacccatgggctgtatctgtgtgtgccccggctgggcgggtggacgggaggagtcgcgggggaggcttggttcctggggacatgtggggtggcgccgacagctccagccgggctcaggtgagtcacggctgcgctttgagatgggtaattggtggcatgtggtccgtgagccatgtgtgagagcccttccttagtcataggaaagggaacaagcgtcgcaaataaaagcctcatcagattagtgagtcagaaaagacgctaatcccaacccgatgcttcatttctactttttttttccccttccaaaagcagaagctgttcctgttctttaagaaaaaaaaattaaaatcagttttctaaaagactgatttaaccacaatcaaaagtggaggggggtgtgggccgtgtcactattgctgtatgacgattagcatgaagatgagttgcactttagccgggctgaaacttgttcctaacagaatgttaaatacttagtgaaaagaaagattatgtctatctagttacaccattccttgatatatgctccatgtcagaatgccattgtctcctgggtaaagacggagagttcaaatacccactatctctcccctggtgctccgaatgctcttctttgaagtttttataatccatctgtcatcttctagcaaggagggcacatgttctgtaccactcaattacagaattctcctttgccagctccaatgagacaggaaagaatgttatgggtggttgagagaaactgtcagatatactaaattcctaggattcatacgcacggtgtttttccagggtaggaacacagcccgccttattgttcaagtgcattagagatacagttggcattggggtagagaacctttgattttttttttttttttaaagtctcttccagagagttgtcttaaatttgattgttctctttttgaaaaaaaaaaaaaaaatcatccaaacctcctctggaatgtggacccgccaatgtgaactgaaaatgtgacatttgttttagctaactaggagtcggtagtccaactgtgcagagattgggaagtagcaaagtgcttttgtttgtgtggtttcactttagtgaaataggatttttacttggtcttgatagaagatggtgactagataaagcctgatccccacagaaataattttcatcatcagctgagccgaaagcctgaaccttaaatgttctgccatctggtgagatctgagaaagttagcactggacttaaaagtctttaaaatgggttattttatttaaggacaatctaccttggagtggttagtgtttctagatatcatgttaacttctcactcattgagtcacgggtggttaaattcgttgtcttatgtgaaatgagtttgatgatctcggcttagcctctagtgggtattaattcacattatgaaatatcccagaataatttagcaccgtgtggcataatttgcatttttactcaagataggggcaatgatagtgtctctggatctattccccccctttttttcattcaaaagaggatggctctcgtttgtggctttcagggtgattgtcggtggggtttactcttactaattcggtgggaacatatggctttagagcttggggtggtgagaagaggaaattttagcttgggcgctaaaacctgacaaggaatatttgcggggagatagttgcagctgatgagctaggatttcatgaccctgcgagagtggacatctcctacatgcatgtacattttacacagaagcacatacatgagactaaagaacacgggttcgggtggatgcattaggtttgggggtccacaagtgtccctcaatttgtaaaaggcgtcttttctctttacaaaacaggaaggttttccagaaatgcaggatacgattacagtaattaatttagtgaaacttcttaaatctgatcttctgttcaaactaataatgccaggatggggtggctcaatgttgttaattgaaatctggagacaataaaaaaaatgtctttctgcaacttcaatacagcagtctggaactgtcgggtcaggctgtgaaccaattttcttctcattacttttgattttggagtcaatacaaatttcatcagtgattgtagggtgcaggtcttcgtctgcatagaccccgtcatgggagaatatgtgcgcttggtttaaagatttatggaaaagtggtgctagtgactcaggaaagagaggaaggaaatgctgaagccaacagcctccttggaaactgctgcagtgctcaggggtgattagcatggagaggcattgggctggggggagagtgctggaccccaggaggcctctgcatctgcagaccactgggggcagctggcggcagcctctgtggctcccttgctgttccttccagacctgtgtctttagcccaagtttctctctccttttttctttctctctcccacgtcccctatatttacagctgtggagagagtccttctgcagctcacagaatttaaggccccacagaaacttaagggtagaaaaaaggaaaaaagaggagactcaactttgtaggagtttgtgaaattctgaaagcatcctgggcaaagaggtcttttgtgttgaaacatagatccaagacgtcgtatgcgattcctcatttttcctgcgtgcagtttgcatctgtgtaagtcatgggatcagcccatctatcattaggtattggcctaattggacattttttacgagcccggtttgctatttatgttaaaagcaattcgcagaaatgccctttcttcatgattcggtattggcaatagcgacgtatgtttaatcacattttccatgagtaattatctaatttacatgattaccaatataaaacaggaaaatagaataggggcttaactcagtcctgcttgggcggtgacacaggcgtccagaaagacccgagtgagggcgaatggttgctggttctgtttccttctgtcatatcatggagatttttattagcaacaggagctctctgaagccgggcctctggaggagagaggctatttgggattctgttgtaatgcagtttgaggttcactctgtctgcttgggttcttaacgtttggggctgtcctttttgaagacttccgggagatggaggtcacattttttattcatgttgaaaaatattcatttatcagtattggtgcaactgtaaacaagtgataaagtgacaacatttacaacagtaaaactgacagcatttactttaattttctgtcattttggtaattatatcaatcaagatccaaaactaaaatgatattttagcatgcagtaagaaatgaggaattcagatcttaaaagaccattacaattagctttgaaatgttcgccattttaccataattgtttcatatagcttatatgtcttcatttacagccgaatattctgttgatcttttataaacaaagtagcacccatctgctccttgagacactcctggcgcctattcattgcaaaaataatacatgtcctaatgacttccacatattttgaaatctcccttttgaaattggtcttggcagattatttgcaggtacttgagttgcatctgtttgcaattttgcaaatgcggaagactttaatgttgagcactgcaagagggctattttaatcctcagataacattggctgtcatcaaaagccacatttatcttttcgaaggtggggcaaatgtttaatgttaaaagacagtaaaaggtcaaggccaagtctggggtctgaatattttcctttcacgtgctgtgccttttgcaaactcttccttgcatttctttttatttaagttttagcttaataaccattgccaagaggatgttttgctgataaaatgaaagatcaggaagagagtaaatcagaaataatagtgaactccaggatcctgagctcattactaccatgtggctagcagctgaccagctttaggttgactctgtttacagggaagaactaaacagcacagtgttggagaatactggggccttgaatgctgttgctggcctgcctcccaggaggggctgaagatctgggagggaaggtggtcactgtaaggccagcgtaccttcagcaagctgatgctgctcctgggcggacccattgcaactggaggagctgctcactctaagagtctgcatggggacttgtttcctctttgttcaaactctgaagcccagaacactgaagttaagtgaaggtactttctggattgctgtctttgacctggtcaacattgagtacacaagcaagccatcctgtcactagggtttttggactctgcagaactagggcagcaggacaggttgttaccagcctccttcctagtgtctcctctttggtcctcatgggggtctgtgtgtgccatgtggagctacagtttgttctccactggctgccattttggccatcacccttacatctgagaataagatgttagcccattttgtgtttaaatggaagtagttggccatggagacgtcattggtggctgcaaatatgctaaccatgaaggtgtcgcctacacaacctacaaaaccaattcacctccaagccacttccaatgactctggtgacagaagggacactaaagctgaaactagccccatcctcttgttaaacgtgagaaaagtaggagcttcacagataaccaggtacagcccagcatcttgaggtttaacttaagaaaggcatgctctaatcctggggtgtttctggatatttttctggcaaaaattgttcaatatgtagttgtataatgcgtagttgtttcctgtttcatagatagttgaacatgcctctggcatagaaacggaaagtacattaactgtgttatggaagagtgctttatcaccaccactcctcatcagcgagcaccttggtcatctcaacccattggtaccatttgatagatgaatgctttacaaatgtgtatgtttgtgtgattagttctttagtacataagtcatatgtagtcatcaaaaatttttattttttaaatatttatttatttatttatttatttatttatttaatttttgagacagagtcttgctttgtcacccaggctggagtgcagtggcatgatctccgttcactgcaacctctgcctcctaggttcaagcgattctcctgcctcagcctcccgagtagctgggattacaggtgtgcaccaccacgcctggctaatttttatatttttaatagagatggggtttctccatgttggccaggctggtctggaactccttacctcaagtgatctgcctgccttggcctcccaaagtgctgagattacaggcatgagccactgtgaccggccaaaattttttatttttttattattgcattcaaataagtatagcattaaaaatataacaaatttctgaggttaaacctaagagaagcctgtagcaactcaacccccgctttttcattttgtttgcagttgcgggtggggagaaggtagcgattttgcacagaatgggaactggcatccaaggtttttgctttttctgcgtcatttatattctgatgctttcatatatgggtgattacactttaaagagaaaagacctcacactcttctgatgatcaaaaatttcacactaccaaagggatacatcagggagcagggatggttaccatctttcccttacagaaaaagaatgcagcagcgggtcctgagatgaactaggactgtggtcctggcgcaacagcatgggcgtcaccagggagcttgttagaaatgcaaatcccgggcctcaccccagacccatctaatcggaaacgctgtgggttaggcccagcagtccatgttttaacaagtcctctaggtgactctgatgcgtactgaggtgtaagagccactgcttcaggggttataaaatggcagtggcttttccaaggctagaagcccaatccccatgttccagaactttccatcatctcctagtgtcatcttcgtgtcccagaggctgtgctacaagcctgtagacccagtcagtaagcacggttgtttgtttaaaatgcgaaaaaacagataggtggttatcgggtgcttctttttttttctgagacagagtcttgctctgtcacccaggctggagtgcagtggtgcgatcttggctcactgcaacctccacctcctgggttcagcaattctcttgcctcaggctcctctatatctgggattacaggcaccaccaccatgcccagctaatttttttttttttttttttgcatttttagtagagacgatgtttcaccatctttgccaggctggtcttgaactcctgacctcaagtgatccacctgccttggcctcccaaagtgctgggattacaggcgtgagccaccatgcccagctattggatgcttctttcttctgcctttctaagagatcatttattggggtttttcacaagtttaccagttgatcattagaatcttgaaaaatgtagaggtgactccgatgtctaaaatgtgtttattttagacttgaattctggagaatgccatctctccgtactgcaacaggtcagtgtaaagtgtctgttctttgacttttgagtcctgcatcctgcagggcattaggtgtttccatgttcaggttggggaacatcacagcagttgttcctgtccaggaaatatctgcattttatggagtcattagagttgtctgtttagagtttgctgggcaggataagaggattctcctactcattgcagagcttctgctggagtgtttttgggcagaagccacagctgtgtgactatagtgagatgctgcgaggaaggttggtggtccaagcccaaggccaacctccgttgcatgtcggccattggcaattctcaggtagagctttcttggcagtgagagagactcttggtgagttcaggatggagtcagaaggaaattcattggccacttgctgtgctgccactgagagtccttctctaggttgggaagtgacaggctgatggccttctgttaagaagttatgacccaggcaccagccatggccaccatacttggtagagtctagcgaacctgcaaaggcttcagcccccggagcaggagaagcaggtacaagcaaatgtgtgggcatggccttcatacccccaagcccagtcctgctcctagaaataaggagacaaagaccttcatgcttcagaccccctggcccatcccattgactccacagcctcagcttcagctactgagctctccacaaatgtggctcccactatgtgagactattttgcatgatacatagattattggatatctaaagacctattagaaaaatataactagcggccgggcgcggtggctcacgcctgtaatcccagcactttgggaggccgaggcgggcggatcacgaggtcaggagatcgagaccatcctggctaaaatggtgaaaccccgtctctactaaaaatacaaaaaattagccgggcgtagtggcgggcgcctgtagtcccagctacttgggaggctgaggcaggagaatggcgtgaacccgggaggcggagcttgcagtgagccgagatcccgccactgcactccagcctgggcgacagagcgagactccgtctcaaaaaaaaaaaaaaaaaaaaaaaaagaaaaatataactagcacattatagctgtgagttttgcagatgctattgcttaaggtgaggctaacttataaaaagaagaaagaaaagagtaggtgcggtggctcatgcctgtaggtgctatggctcagctctttgggaggctgaggtcagaggatagcttgagccctggagtttgagaccaatctgggcaatgtaacaagactctgtctctcaaaacatttaaaaattaaccaggtgtggtggtgcatgcctgtagtcccagctactcaggaggctaaggtgggagggtcatttgagcccaagagttcaaagctccagtgagctatgatcgcaccactgcactccagcctgggcaacggagtgggaccttgtccaaaaaaaaaaaaaaaaaaaagaaaaagaaaagtgagttgatttaaagttaattaaaaaaaagtattaagtaaataaaggtctggatggcacaaagttatggtgggaactgtgaaagggggctgtggatgactgaggtgtggaatgggctgagggtggccagtgtttcctgaacctccttggccatcccctggggagggctcctgcacccagcagaagtgtggctggtccatcctggtgagtgttttattgagaggagtcccaccccctcttcacatctcaggctgctggtgggtgcacttctgcgtctcattggcaatgcaattactggcaccatgggaggtctgcaggttcaaagctagtgatgagaaatctagttcaccgctttcagaaatacgggtttggtttaggtggcgatggtggtgcttcatcaaagaaaaactccaccaacccataaaagacaaataagaacacagagtctggtgctcctctgttagcaggagactccaggtgagaggctgagcctgcctggctggtctcctcattgtcctctcttcctccttttccatggcggctgcccaggacataggtcctccaggtgcaggtgggaagggacagtcatggagctgtaccactgagtttccctgaggcatccacatgacaagtgcttgtaccttgtaactctgggctgatgcacgggtcaaagcatggggcttgtgctgactcagaggccatcttccttggtgcctgatggcagtctttgctcctgtatttcaaggctgcgggttttggggactgacagatgggcagcaaggcagtcctgtgcttcctgaagtcagttatgccactgcctctgcgtgtgctgccccaggaagggagggctcatccgtggttggaggcttggagatgcaatgtggacttgtcttgctggtgttcgtggaatgctatggcatccttgggtggccaggtggtcagagggacctgggtggctggtggaaagtgaggggcaacagtgtcgcctccctgcaatggtggggacatagggggacctcaccctcagggaggtactgcctgactctgcgatgcccacactgcctccttgtttgtgtcccagtggcagatgggggctggtttcctcaatatttgggactttctgaggacgcctccaaggaggatgagatataatttctgccctcgtggaatttgcaacatgaatggagagccaaggccaaccctcttgggaatgacctgtgtaaggcaggggtgctagagcaccaagcccgtcaggtgtgggtgctcagggacaggaagttcagggtgatagagaactccgcagcgtggacaggcatgagggaggatgtcctggtgtcccctaggtgagcaaaggcagtgagccccgagaaggaggtgggaggagggctgcttggtgggagcagcatggtgcagctcctctgtgagaccccagaatgcagcacagcgcatagcaaacagtacatgctcaataaatatttgttaaactgaactgaatgggactagagcttcggttgcttatgtggatgccagggctggtctctagcataatgattttggaaagcatttactgggtccctgccctgtcttggattctggaacccggagcccctacagaagccacactgcagtgccatcacccgtggagctggcagcagaacccactgggaccagattccctggcatctcccagggaccatccccccgaccagctccttttattaactcagtgttgaaggagctgcccattgctgaggaaggatggaaatgaaagataacggagtgtgtgcgtgtctgtgaaggtgacgatataaaggtaatgccactatgaaaggtgatctcattcgcaactcggcgactccaatcttctgtgcgttttggccttttctgaatcgctgccccactcagccccaagtcaaaaatttgtttacactaatcagattttcagctactcattctgttgcaagaagaagttaagttgtgtgtgtgcacgcgtgtgtgtatttcatacatttatgggttaaaatcagaccccgcgtttccattgttttctatctctaggttaaaagcttttccctgaatctctcctgatgcatctctctagaaagaaactcccagactgggctaggctgaaatttaaacacacacacacacatacacacacacacacacacacaccctacacacacgcatttcagactacactgaaaaactgcaagagaaaataagaaatccagcaacaggaaaggaactttcagttttcacttccaagtttggcagcctggtgaacttgaaaggttagctatgaataagcataatcagatctttctttttgtccatatttaattcaaatgagacagctctgtgttgacttctaatacagaaaggccacccaccatggtggcgctcccagccaatgaagccggctggtgaaagctttcttaaatggtgctaatcagcccggagaggcctgccctctatccccatcagtattctataattcagatgtgctgataacctgaaattgaatgtgtcaggatgcagacatgtgaagggaagagggaactccaggctagaggagccgggtagctgggagacaatgctgtgggggagggggtttcacaccctcccctgatccccccaggcccccgccccccgcagttgtgcctctgtgtgtgtgtgtgtgtgtgtgtgtatgtgtgtgtattcgtgtgcacgcatgtgtgtgtgttattgttcagggccagagacaaaatggaaggtttcaagttctgaaatatttataggaaagctttggattttgtatatgttaaatgaatcaacagacattttggctgctaaggggtgaatggtaatttgcgattaatttttttttgaagccaaggctattttaaaacctttctcccactttctcatataagagacagacagacacacacacacccaccccagtctggtgagcacgtctcacagggaagtttaacaaaagagtcgctattgtcactgtcccagccggcagcagtgcagctgagggtcagttgctatttctattttaaaccttgatttttgcaaagtttgtcttttgactgttctcattctaatcaggcttagttaggggatccgctccaagctccacaccaggctgtgaggacagagaaagataaaccggggggattaaacaaaaagttctgctctgtcaatagtcgtgtgtgtgtgtgtgtgtgtgtgtgtgtgtgtgtgtgagagagagagagagaaagagagattcattgaccaacactcatctcgcagccatttctttaatttcaaagaaagtgcagtttgtcacagagctctgccttctgtgagctggtgcctttgactttgcatgtgatttgttgggtgtgccttcagggtgctggctcttcagtctcccccttgtgccccatgactttatgtccctagaagacaggggaacagcagctccagccccagtcgtgtcttcagtacctcagtctagcccaaacatttcccaaatgctcgggtgcaatcctctgccagcctctgctgctgccaggagcccagccctcttcaactttgctggttgatgtcttgatcagcttagaagccgcctgatttctgcatcttcccccatgtgctcttccaacctcccgctcctgcaggtcaggagggacctttccttctgcaggtctcccttcatcagagcatgtgtcattccatcctggtttagagacatctgcatgcctcttgtgtgtcctactgtgtgatgtgctccttaagcgctgagtgtgtctgaggcgccttgtccaccccgcatctccctctgcacagaaatgggcaggaactggggagacgcactcagaaaggggctgaattgcctgtggtccctgctcagggctcgccatattcagaggaaaggatagcgaggggagacaggctaggactaggcaggatagtggagatatagaagctgccttttttcgtcatggttccagctggtatcaccttgtcatctcccactcagtccaggctggccttagggacacgggtctgccctcccaatcaagtgggcactcttttcttcagagctcctagattttcttcctaagagactgctctgtcaaagggtaagaagaaggtcccaggtttttgtttctcttttcttttttttttctttttttgagagacagggccttgatctgtcatccaggctggagtgcaatggtgtgatcacggctcactgcagccacaacctcctgggctcatgagatcctcctgcttcagcctcccaaggagctagaactacaggcacataccaacatggctggctaaatatttttagagacagggtcttgctctgttgcccaggctggagtgcagaggcacaatcacagctcactgcagccttgaattcctgggctcaagcaatcctcccatctcagcctcctgagtagctgagactacagccacgagccaccatgcctggctaatttttaattttttttgtagagagggggtctcactttgttgcccaggttggtctcaaactcctgggctccagtgattctcctgcatcagcctcccaaggtgctgggattataggcatgagtcaccacctggccaaggtaacttctcatctccatccccatcacggtcagactgattggcaccatgtggcctgtcatccagaaagaccaagaattcttccctgtggtttggacccagtggtggcttccccaagggaacggttggcatatgtttaattattcattggtgttctcgtctgtatctctctcctccttgattgttttgtctttccctaaaaatatttatttgaaattctgtgatcaaagactgaaaaacaaaatagagcaggatattaaaaagaaaatttttttaaggaggttggaatgtcaagatcatttttattagaaaagtttacaagatgaagccacgaattatttacgtaaacttcatatatcaagcataatactcccaactgtgcctttggtgagtgatattggctggcagaacttggatttaaaataccttctacttaaggcaggaagaatgcattttaattaaaattaacggattttttttcttgatcatattttaacacacacacacgcactcacacacatctgtgttcagaattgataaagaaggaactctggttaaataatccacttttgtctgacaacggaatccgttatagaggtgcaaatatgcagaaagctatttggaaatgcatcctagtagttgtcaggttttattatgcaggaaggtgtcatgtttgttacgaagctgagtgcagatggcagagtggaagaaatggatcactaattttaacaatgattaatgaacagagatagaaaatgaattacattggactatcggaggcaagaaatatttttgtgaaaattttgactcatctgctgtgctgttctctgcaaattattttcagaaattctatatgttgtcaacagttgactgcattttccattactgtctatttctgttcttaagtacttttgtgttattagagatacataatttcaaaataccaatacattcctgattacttagagaaaatatatgtaacagtgtgactgttccatagacactagccataaaagtcctgttttataataatctttcattcttcctcattttatcactacattaggaatgtttgataaaaagaaaaggagggggactcttctagcacacgcagaataaaggaaaaatagagtgaaggtaggaataaaaatgtggtcttggtggcttattgtggtgctgagctgctaccaaccctgtccatctttgcatcccctgcctggcatcatgggaaggaggggccaactccttctctggtgttaccctctgccatttgtggcacaccccgtcctgtcctctgtgggtgcggcttcaggcatctcctgactccctgtctgccttcagacacagggagtatcaccagttcatgaagttgtcccagagattattttttcctctgtttgacccttccttactttagttctttctctctgctccagtgaccctggtattgatagtgagttttcacagtgctttgcgagtctcgctttctttttcagcctatcagcaattgagtgtgtatgtgtgtgtgtgtgacagagacacacacacacacacagaaagagagagagagagatctgcaacggaatacagcttatttgtttatgatatctgttcttggcaggaggcacacctatataatttctcatatggagaaaatggatagtgattttcttttcttccatcttcctccccccgcctccctccctttctctccccctctcatccttccctcccccccagatatattagccacattaaatatattgacttcagggcttctcattttcctgagatcctttgcaatagagaaatgatctactagtgtttagatcccgcgttgtaattggtaggcacttaatttcactcatcaggacccactttagtggtgacctgagtacatttcatagttagtaaatttaggattcttactattgcaggaccacccaatcagagttcagctgtgcatctgtggtcagtgctattagtccacctctcaacccatcactatttaatacttggcttggatgttaatttgaattaaaactttacctatataagggtatagtcctggtgtggttttgacaactccccattctttcctcaagaaggattccctcaagacaagatgacagggtgcttctcgaccctcccagggagtgctggctctctagagccctgacatttgtgtagggtgaagctgcctcctgagaactgcctggtgtctgaacaaatggacgatctataacgacttccttctcctacaaacgagctttccaagttttcaacttgactgttttatttatgctcttgacctgtaaaaacaagcaggctgtttaaaaagcaaaaagtacttcccatgattagagtacttagagttgaaataaattggagaatgaagcgaacattcctcgccgcttcagtggaaaatgtcgtgggggttttccttcttgagcatgttctgtgcttctgcaagccggaactccccaatctcgctggccttagggtctccaagaacggattcatgtgtcttccccttttcttgcttttaggtagtggaattatcttagtgaacatttaaaacctgtttgcgaatggttctaagtcaagtagtttgcatataattatggtcctgatgggaaaacactttggaaaaacaactagtgatacaatgcaagtcccgctcaggttacatagcatatgctaaacactgaggaaacactcacggtctttagtgaacaaggtaggggaaggctccagggagccaatttagaatgtgacttaaggcaagcatggctttttgtgtctctttcttttggcgagtgtgttgagtagcagtggtccctggaactccgcaggaaccctgccacctgcctggggaggccgccctgcacagatctgtacaaggtgggtgtccggagaggagcaggttgaacatgaggactcagtgggaggctctgggtgagcaaggtttggtggagacagtggtcactgggctggtgctcaactggaagttgcaccagggataatttaatggtgtgggatgtagagggagagttacgtacaggcagggagggggagagaatcctacaatttgtggatggagagatcaggaggaatgaaaaagaaactgtagatgatccacttaagagacaagtgattcctaaatatagaactgtctttatgattcatggttggggttgcttttgaggcagtaagtcaggtggattatctataggaataatttgagggtacttgagatttcgacatttgggtctaaacaccaggaaacacattggtgttcaggttacattcctcctcctactatgaatatcttctggctatttaacctgagtgtgttcatgcctgtgtaaatttggctcctggcctgtgtttgtactaggttggtcccccgcctcggcttgtacgaacgaagatgccacagcccagtgtctgtgtgtgcggccttcccactgccattcccggaggcagctggcacccatgtttcacccaaacaggagccaaaggcagtcccgcttctagctggttccagttttcagggacggcactgtttatttttccacagtcgttactgggtttttgttttggttgtgatcacctttatatatccctctgaactaactcatccaatcagaactggagagaaaaatgatttgaaaagtcatttaaaaatacctacttctaaggcgaattcatccaagtcatcagataggtgcacacacccccacactcatttggccacaactgctggtctgtcgcagggcctatgtgtttgatatggtgacaactatgtgtgaaaacataagacccaccagccgacaattcttcgtggatacaaatctctaggcatgtcccgggagtgcatctttttagcctgccaacccctggaatatacattgaagttaagctgagttgagtaattataatgctatggcctatagcatgaactgaagaaaattcaagatgtctgtcatccttctattacctcaggtaaataactgattgacctttttggggctctgatactttactaatcagaacctgaaatctggataacaacacttcatttacttgatagacaaaagaacaattgcacttgaagtaatgtgatttctaaatagacactgcctgtcaaaaataaatgcattagaagtaaaatgtagctcaaggagacaattagcaaacagaggtgacaccgtaaacaggtgcacccattattcccaaagcttgtggcaatatattcgcgtcttttagagtgatggaagatcatgtgacggtttggtgaattatccatcggtatcatctgactgatgaagcccgctgctgttgcagaacatttaaaaatgcatctcacaaattacatggtagctgggaaaaatgcaggttttttttttttttttttaaagaacaatgcttttctaaagctatgtgctagcatacgtaattttttctttgaaaggatggagaccatttcattatgctgggtatacagtcggttaaggttgtgcaaattcattacaatgtttgttaatgtataaaacattttccattctggttttagtgacattggattttttttttttataatgtgccatttctgaaacatctgccatccccttgttacctgtgggcagaagagagagaatgcactctttctaagaatgtttagaaaatcttttccaaaatggaaaggcttgggagataagagggaaaggacagctttttctgtgaatggttaggttggaattttctgggataggaactttaccatgcaataggcaaagaggggctgtcagcagctgctcaatatgccaggagaggaaaggcctggcttcctggtggtctttctgtgccctgtgtttgcacaccctgtactgagcactgcttgcagagtacatgcttctggaagctttccctgtgtttttttcttttcttttttttttttttttttttgctaaagcatgagagatgcttgagggacttatcattttggcagttactatttcttcttgttgctatataatcacaggaaaacagtgtgaaatattttatgtgacctccacattcatctgcccttgacttttctcatcccttctccagaataaccagtagctggagctaaggctgatatggatttaggggtcaagttcaccaggatagctgtattttgatcacaccctctgcccagatagcgaaatgagcaaaaccccaccattctctcgccatgttcctagcagcctccacgttcctgctagtttctagctggggaggtggctcatgtccattttcacacttctctctggtctctcatacatcacagcactttttgaagcatccaggtttctgtcttggagactgaagaagtgagagtctccacttgtgagagtaaccaccttgtgaggtggaaacggttggaagagctccttgccctatgtgtcctaggagacagaccccaggaagtggctgtaggcctgactgaccaaggctctcctccagagacacaagtccgtgcgttttgtgaattaaaacaacaagaataacaaaaacccctgcacagaagtaagaaactggtagaatgaggtcttcagcctttgggatctgtgtcgttgaaagccaagagcacttcttgaagagctgcccaagtagcctctctgggaattttttggacatcagctcatcggagaagtggcggccagaaggcttctgaaggatcccaagtctctaagcactggagagatttcctgatttgcagaagtggaaatacttcagctagggaagaggggttcactgggtttcctcaaagctgttctttcctcttttctcttttttttctttgtaaattaatagataggtaaagttcctatcccagaactttgtaaattattttttgagcagttttaaatatccaataaaattgagcagaaagtacagcgttaccatgtatcttctgacccctctccattaaaagacattttagttgtttccacctttcctctgctattaaatttgtgttagtgtggtacttttgttatgattgttgaaccaatattgatacattattatgaatgaaaattcataatttatattcagattcactctttgtgttggacattttatgggttttgacaactgtattatgacttgtatccatcattacagtatcatacagagtggtttcactgccctaaaaatcccctgagctccactccctcttcccctgaacctctggcaaccctggtctttttcctgtctcccttgtttagcctttcccagaatgtcctgtatttggattcgtatgacatgtagtcttttaacattggcttctttcacttagaaatatgcatttaaattttctccatgtcttttcatggttagatagctcatttctttttattgctgaataatattccattatatggatgtaccacaatcgagctattcacctcttaaaagacatcttggttgcttccaagtttgggcaattatgtgattcataataacattcaataaacattctgctataaacattcatgcgcatttttttttaaattttttactttttaagagacagggtcttgctttattgcccaggctggagtgcagcagcacaatcatagctcacttcagcctcgacctcccaggctaaagcaatcatcctgcctcagcatcttgactgcaggtatgcaccaccacacctggctaattttaaaatttttgtagagacagggtctcactatgctgctgagaatggtcttaaactcctaggatcaaacgatcctcctgcctcgaccttttgaagtgctgggattacaggcatgaaccactgcacctggccatgcagattgtgtgtgtgtgtgtgtgtgtgtatacctaagtttccactcatttgtataaatatcaaggagcatgattgctggattgcttgataagacaatatttagccttgtaagagactgccaaactgtcttgccacgtggctttcccctagcagtgaatgagagttcctgttgctccatgtcctcctcagcatttgatgttgtcagtgttttgaattttagctgttgtgataggggtgtagtggtatttcatttttgtttgcatttgcaagtccctggtgacataggatgttgagtatcttttcatatgcttattttctgtctgtatatcttctttggggacgtacctgttcagatcttttgcccatttttaaattgggctgtttatttcttactgttgagttttaagagttcttcgcatatttcagataccagtcctttatcagatatgtgttttgcaaaaactttctccaatgtgtagcttgtcttttcattctcttaaccctttctcttcttaacacttgtggaaactaagctactttagccagtggcttttatttttatgtggccgagcagcatcgatttgcatttgaaacctgagattttgagaaatttggagtcaaagatacacatgatgtatgttcttaactatgttcatgaatacatatacatgtacacatgtgttcattaacacatatgcatgcatatatgtgcaagaatggaaagaaatgcaccaaaatatcaacagccattatatcagttaatagaattatggattattattttcctctttctaatatcttgtatattccaaattttctacaaatgagcatatataacttgaataaccaattttaaaaagtaaaaagtaaatgagattaaacaaaaagtgacccctgtaaaggagataccaagatagttccgttagaagtggcataactttcatttcgacttcagagatcagggggaccaacgtttcaagtgatatccgtgataatatgtgttctctaaaaacctgctttggaaaacaagcaaatttttagtatgaccaaatttgactgtcgaaatgccagattattttgctaagctcagaatctgcactgcacaatagaaatatagtgcaaaccacaagtacaagtcatgcatgcatttttgaattttctaatagccacattatattttgtttaattcagtgtatccataatattatcatttcaacacataaaaagtataaagaatattaatgagacatttttcattcttccaaatgcaatttgtagtttacactcacagcgcatctcaatttggactggccagatttcaagtgctcagttgccacgtgtggccagtggctaccagcttggacagtgcagttctatgtgatggcagaatgtatcttttttctttccaacttttattttaggttcaagggggtacatgggctggcttgttacatgggtaagttgtgtgtcacggaggtttggtgtatagaccatttcgtcacccaggtaatcagcatgacacctgctagatgtctgaacattcgagtgatatttatcaagcagaatatcagcacagcaagcagcattacctctggtagcacaggtggaacagaaaacaactctccagtttccagttattttacatctcttcttcaagatgcattacttcatagatatcttggggtttgatgatgctatgaagtactttctgtaaagcgatacgtatgttgagttcatgtggtgatacactctattagaaagcctttataattttctggatttttcccccgtttgcatcattccatctctggcggccagaattgtcttagttttgttgtcctgccaagtcttgagctgagtggggtcttcatccttgtggatggggtgagagatccagggcaaagacattgggtggagcgaggttcagggagagcctgccaggcactgactgctggagaccatggcctctgggggagctggaggactccatcctgagtgtggttaggctctggaaatccaccagcttggcagcttgttagccagtgctccctgcccttgtagaaaatgcctgcatctagtttgcacttcttaccctaagaacactgacctacagggtaagttctccttcctcaccttgtcctgggtcagaaccacccaccttttgctggggagtaggaacccaggtgcagaatggtgccaagctctgtgcgtgctcctgaggatacggccatgggggccactggctgtgtctgaccggcggacatcaggcagacttgactgccctgaagatgaggctctccgaggctgtagggaagagatgctgttgccttgcgttggggcacagtgtgtttgagtggctcacagcatgggtcatggaatcagtctgctgagattcacaccctgggtccccatctcctgagctcttaacctcagacacagaactttggggctagtgcctcagttcttcatcaataaatgataatacccacctcataagatggatgcaaggatgaagtgagattgcgtgtcaatgcttggaactctgggtggcacttggtaaatgctagttttcattcttattgaattcaagaatggtcagtcaatgaacaaagccctcagaaggtgtgtgtgtgtgagtgtgtgtgtgtgtgtgtgtaaatacatactggctgcttcctggactacatttctttagtggcccaagtgttcctatctcttgcactatcaacctgcactgaatcaccggcaagagtatctcccctctcccttcactttccctctctcctttcttccttctcagggctgttttgactatgaattaattgtaggtttggggacttgcaagcaataatcaaagccaataaacttcaaaaggatggggaggaccagggccaccgggggagtgcagggagccgactggagctcttggtggctgtgggttggggtggtgggggctttctatgtttcttcaaaggggacaccaagtgtttcagattgtcacttaaaagctagatgcaaaactttggaaatctggtgagaggtgacggtttccaaaacagctatttttatcttttgccagcaagcatgagcccagtggaacggagagttaaacttggaatttcttggcaagggttaataatcaatgtagatctcctaacaaaggagatgctgccttattatactgggaaagttttttttcttaactgtcagtgaagcagtactaattattactccagtgtaaatgaggtcatttcctattaagagaacaaaatgctcagccctgccttgccaattcataccaactatttttcacacatactcagctttttagttttttttaaattttgataaaatccattcatttgtattagaaaagtgtaaaccatcgccataatagttgcccgtgattacccagatgagcttttgtaatgtgtgggttgtttgaataccatgtgttagctatggaacaattaggcagctgaatggatctttaaaacaatcagatacttttatctcactgaaaaaatacattccttggatgtgtactgttaaaccgtaaattccggcgaacattaagctcacgtcaccaggagaactttcggatatatgttgatcaaggacacaaagacatccaaatatcttgtcttcatgttttttttttttatgcaagcaaaaagatttaaggaatattgtagcaaacaaagggtaattgttttagcccagatgttgcttttgcacaacaagcaggttacaatgttcccacagagctgatgagcccaatcagggaaatgattaaaaattgattttgtccctgtaattacagtatgtaaactacttagcttggattgcaaaggaagtgattttctaattacgtatatactctggtgtctaatgattggttttttgaagtaatgaagagagagcactaacgactccttggtgttctgttgtttaagaaagaccatctttagagtaagcggcaacagacaaagagtttaaattgaattttcaacactgttgatgtgcacatggatttgtttattaaagagacaggggtgtaatttgattggctctgagcatcttggctttttttcatgctaaagcatgtaaaaatacatgcacagggcaggcgagctgatgagaggaagcctctccactcctcttttatcatccccgagcctggtccgatattgtagggtatcaggtttctgtgagcttctgatgtctgtgtatcctgaaagcatttagatcgaacaggtatcaaatagcttctccatcaaagttacctttgttttaaaatgaaagaagaggcttcctttggaagcgtgtctgggcagccctacgcgctctgtgttataatatttcagccgtgtcgtatgatgctgggctctgtgtcagggtggcaactgctgtctacctccaacatgcatgtgaatgctcacacgtgcacacatacatgcacatacccacacacacactcatacaggtgctaccgcctgtgtgcggaggcctgatggcagcgtgtccgttgtgggaccctgtggagtgggctaatgggttttgggaaagatcttgccaagtttctagtgcttgtcctcctctttgagacacattgtggctgtcgaataacagctcaggcacctgctctggcagaagttagcagagggtgaccatttctccgttggtatgtcatgccctctgggaggagggtggtggcttcagcatgaccctgacagcaagaaccttgtgggcggtgctgtcttcagcagaatccaactcacactctctctgggccctgtcctctcctacgcgggcttcgtgctggtgacttgggacccgatgttttgaaatgtaggttttattattattcagatatggcgtggccaacagggcaggagacaactgagattgaagggacagtttgttactcacagttcccaagaggaagacatgccatgccacgtggggatcacatggagaagcaccaggattcctgggaggcagaaggcgagaggggagaagagggacaagagcctttatcatagcttcccagggaaaggcaaggcaaggcagggctgggagggtttgaattggctcgtttgagtggtttccacaggcatggaccataggggttgcttctagttgtctggtttctggccatgggcgattagggcaggaggatagtggccccaagtggggaggccctgtgagagcccagtaaaggtggtgtgggcggtgtggtttggactggctgttttatatatgaaaggagctcccggggagtcatttaccaactctagcagggcagtctttctggggccagcaaggccccaagatgtcagggcatcagaaccttttggtgaacacacctgggtcctgggctgaggctggtttgggagctggttccctgtgccccctgggtcctgggccagggtgagcgtggctgactctgggctctccttactcttggtgttctacttggcaggtctcactgctttgtcatggaacacatcccgaatatgcctgcctttcccctgccactgctctctctccagctcacaccagatcctcgcttacttacacacctgcagcagcctcccccatgggtccccctgcctcctctctgaccccctcttgtctgctcctttcgtagcaggcatacagtgcaaatagatcatgtttttcctgtgcccaaaatctaccagtggctcaggataaaaccctttccgactaggtacgtggatcctaaaaagcctatcttcatccattctcccactcactatccatacccaggccgcagggaatgtctcagcgctccttgaatgcaccatctccatccaacctcagggcctttgcacttgctgttcactcttcctgtaccgccgttgcccgcattctcgcagggctcactcccttactttattccggtcccttgccagatgttgcttccttagagaggtcttctctgattgtcactgtcacttcctccagctttattatcttcttagagattgttatttgctggcatattttacttttgtctttcatttgaatctggtctcggaaacatgagctccatgcaggtggacacgatgtttatcactggatccccagaaatagaatagagcctgactgcaggggtgctgggtggataatggttgagtgagtggctgattctccgagagaaagctccctgggagctttccacaccaggacccccttcctgttggaaatctgtagcaacaatgggtgtgtcatttggggccatgttcatcccccagcgttgtctgagaaagagagaatcactcagtgcttggagaaaacttccagatccggttggaggagctgcggttttttggtagggtccttgttgctagtggaacttgagaatatcaagctctgggctgggaggaggtctcagaaccatgggagggaagttgccagcacccagggggtgcacactggagaagacgctctgtgtatcttgggacgcagagagcctgctcttggtagagggggttccgaggcattgcttgggagccactgcactcaagtgtcatctgtggggagacttagttgggcacccagctgtttcccctctggagctctaaaccatgtccttccccgggcagagggccgaaggagccggactggctttctctccaaatcctccttgcccaactcttttctggaaggaaagtagtttccctggctcccaattgccactcactcagatgcctccgcagacagcccctgctcctgctgccagacctcccagtgacccatccggggaagggccatcctgtgtctccccaggaatacactccacctcccgcaggagagaatggaacatgggccaggaggggaaattgaagcagccctcgcacctttcctcccaaccatccgcctcgcctccatctgtccatctgcactttcatccttccatccgcctcacctccatccttccatctgcactttcacccttccatctgccccttttctttcatcctcccttccaccttcagaccctctctttcctcctgccccccttacttttgttttccctcccacttccatttttgcatccatcttcatccttctctccttctctcctccctctctactctatctttcctccatccttccattcccatcctcccgtctgttctccttccatccttctgtcttaacttccctcccctactccctcccatccacctaggtcctctgacagaggtgaggggctggaaggagagtctgacaccaccctttccccaagtgctggactgtcctctgcatgtgcccggggtttgctgtggcctcagtgatggtgacattcattgctgctctcatatcctccaaattgtcatggtgtggggtggagacaggtgtgcactgcccacaggcaggaaactcgctggcctggaggaccgctctgtgctaaactcagggcccatctcagagccatggtgatgctgggggtaccccgtctctgctcatctcttgactggccaatcactctctccctcagagcccatgggtctgagtcgggcaggctgggcttttgctcagggagggtttctctggctccttcagggctcctgtgtaggcagctctgggacgatatgggagggaggagggtgcctcatcccctgtggggagcccttgtggcctcctgctttggtggacagaggggcccgtgcagggctagcttgtatgtctgcgttcagcggggctcattcagtgaacatggctgggctgctgggtgggtcctgccttgcctgtggaattcacagggatgggggtgtgtggacttggggtaggcccactgtgtgtcaggatgggtcagagctgccgaggcaccttccacttcctcgcttggttggtgccccccatatcttcctgtgctcccacttcccctttgaagtccctctctcagaactttccactcctgctcttgtctccccttcctcagagaggccttggaagtacctctggctctaggaagtctccctttctccctcctcgctccccagcagcctgcatccctgctgtactccagccagggtccacccaggaaatggccattcagccttcccttctttagcccctgcaaaccttctcactcccctttctggaagttgcggccactctgttgcacttctgtgccccttcctggcctccagccctgtctccaccagggccctgcctgcacttgcttaagggcttgactcaactctgcccctctcctggtgccctgcctttgatgtgctccttgtcctggcaaccgggaccttcacacgatgggtggtatctgatgggcagacctgcttggcccctgacctaccccagaggccccagtgcaccacaggtgctgggaagggagtctccaagccactgagtgaacaggcctcctaagctcatccatgttgctggggagggctgcgtgggagccttatctgtgctttaagagggaagcaggagccatcagtgtacagcgagtggaatttcaagcactgaaaacgcacctgtggaggttcccttattttgatgaggtgggggctacccaacccccacttagttcataccatgctttttgtcgcctttgcaatcttccccttcccacccctactctgagctgcaccaaactgggctcatggacagagtctcctgggtggcccctcaggttggggtccctgtgggggacagggcaaggggaggcctcacgtccaggctgcttctggttatgccactgactgtgttatgtctaaatacaagtcacttacttgcaccaaaagagctgtttctttcattgaggaagacagaatgactctgctggtgcttcccttcctccccaccctgcatcacgagagcatctgtggtcagatggagtcacctttccccgacccgcagtgactgtaacaacatcagacaccaggagcctcctcctgtttagactggatcagaaaggcacagatggaactaacttgatttcttttcctaagggcccagtgaggctgtactcgtcagctgccctactggcgtgttgggctaaccttgcccacgcaggtcagacacccttgcataagcccactaatctgttggaagagcacagcctccaatgtagccacgaggcttgtgctgggccctttcatgatttagagcatagaacctgaggggtttgtgcccatcactgccccggtgccaactgcaggagacggtgttctgatcaatggcgtgaagctggacaaaccggtgtgggacttcccccgatgaagactctctgtgttctcctgtcattggaatttacagggcctctaagtgaatggcccctggagaatagtcctagaattttgcaagtcatgagcttagatataaaatctgagtgtgtctcccatctcctgcaaccccctccctaaacataaggaggtcgtagagcaaagcaaataagtgttttcagagccggctgggtgctggggacctgtttagctcagcgataggacagaactttggaaagtgtagcattgggcatttgttcctcactccttagattttgagtgacacggggaaaaaaacaaaaaaaaatgcaaaagatcatctggttcagggaagagagagagacagacagacagacactgagatgtaatttctttccgtgttggagatggttgagacatcaggttttgctttatgtctcaagataggcaggtagaaatgtgtttacagacagcagcttccctgtggcaccctgagaaaacacttttcgagcatgcagtcagcaaacacatttttggttgccagaaatcagccttggagttgaatgaagtgttgcaagccagtggttcaatcagtacaaacttcttcggctggggctgccaccagtcctacaaatgtatcttctggttttccatgggcagaatcagattttctgaatccatagcgaaattctacctctgtgatcagaatttacaacttcactttcagtaaaatataatttattaagggaacttatgtttgccccataacatcccttccgtgacatggcaaaacaaatgagaatccaaattgcactgggtgaggagtgggctggagatcacaggctgggggctggccttccttgattaccccctagccagcagctctgcatccatcatagatgaacatcccagctttccttcttgtcctttatcacctctgagcatgccgtaggaggtgagatcacccatgtgggacttacatcagtgataaaacagaatgaagaagtagaaaatctcactggctgctgctttcctggtctgggttcgggagagaggacgttgatgccaaacacaacatctctaagcctcagtcagttgcagattcccattctgtatccactggctaccaaacaggtttggccagttgaaatttgggtggaattttggtctactgtagagggctccataaatcaatcagggaaaaagcaaggacccttgggtacttcttcactttgagaattctaaagaagagagacagcgagagagaaagagagagagagggagagagagagagagagagagcccttataatattagctcctatttcttctgtcccatatagagaagataagagatggttagaagttctttttgtgcaggtggcgatttcccactgaaaacaagctgaggaaatttggttcattgcagcaaaggtcacatagttcccattttttaaattgctcaaagaattgggggcagtggggctattcaagttttttaggctctcaactaacccagcaaattgttactttggatgaatgctgtttatgtgacttactgaagtcgacttatgtgacatttacagtttctaacaggtcttatttttgcagttcctgaccaccacggctttaagaatatccttcaaccgggagggagatccattgctttaagacttgcctggtaaggaccatcgatttgtagtttgttgaactggtgtctgtctgagtttgtggggaagtccaggctgccttctctgggctgctgatccctatgcagagctatggagaaacttccagagtcacaggtgtctgggaggtagcatgggttccatatcttgtgggcggggtgaactacaatgtggagacatgttcttgagtctctgaacaggttcccccatgaggcaaagcccaacaagggtgacttctttctctcttgcgtgacaccctgagtccctatctgccagccagcagcctggaaccagggctgagagctggtggggcttttgctaaaggccgagtgacctcgtccaagtgccacctgtggtcgggctccccatcactcaccaggtgactcagtggcttggcccagtcttggacaaatcctgtcccaaagctgctccgtgtttgtcacctcaatcagactccagattgcaaactcctgacggggtgtatttccggcatgggagctgatacaaacttaaaatacaaaacaaagggtgacatatgtatttgatatctttggtggcctcatctgaggctgcccctgatatctctgttaactcaccctcggttgtaattagcccagcccaccttctcctgaccacacgtctcagaggtcactacataaaccagggaaattgatagcagaattatgcactcagaaattaattttatgttgtactgaatatatatttttttttattgtgactttatcttgctggaaaagtgcttacttctgattttgtggatattcctgaccgtggattacttttattttgatttttacacaacagttatattagaaatttgctgttttattcttaccttcttagtaaaaatccttttatcacacaatgggtaatttatatccattaccaagcctttcaatccttttcagtggggctgtcagtgccgttggcacagtaatgattaatgtgatctaataatagtgtaccattatattaccttagtaaaacatgtaccaacaccctattccgatctaccaaattcatagcttcctataatatttttgttgaaagacaggattactatttttcaaagctgattttttcccctttaacatatttaatgaaattcacaattctttgccttagtaatcctgggcatgtgactgggcttgatgggtgaactccacatctgtaggccctgttgtgatttgtcaggagaaaggtccaaccatcccagtgatctgtcagagagattattttgtttttgttgggcctggattgttttgccttaaaaaagaagaaaaaaaattgttgggtttccagtcctttctgatgcataataaggaaggtgtgttttagattgaaaggcaaagtaggaagcaatttggttttttcctcccctctgtcacctgcttctgtctgccagtgaatcggaggtatagccgagccagtggaagtggctttaaaccgcttccccagaaatgcccctctctgacccatccactcctctagctgtggccaagcctctctgggtctgacatagggtctttcacatttggcattattgaaattttggactggatagcgattggttgcggggccctcccgtgcactgcagaatgtttgcaacatccctggtctctgcccactagatgctgatagcatgcctccaccaacacttcctccattgtgacaatcaaaataactccagaaatcaccatatgtcccctggggggcccaatcatctcttgttggtctaacctataggaaaacgagcagatatttttggcatgtcggggaattcctgtcagagttccagagttccatggtgctttttcggaagtctttggctttgggagagaagatgtgtgggtgaagacgacgcagggcatcctttccttggctgaaatacagccctcttcctcctctctccctcctcctctgccatgagcctggcccgagcgagggcctgaatcttagcgtcttccacttaaatcccattataatcacgctcatgattgataacattccaccttttcaaagggctttaaaatctgtgtcaaccaaggatgacattattgtagtgcgggcgagatgtattcaaacaattacacgctcaaatcaaagtgggaagttttgtccttctatctcggcgcctttgtgtgatgtggcttcagccagcaccacagtcctcacagccccagagaccttcaacagaaaaataaatgggaagaaacaggttttgcccttggtaccattcagcttggaaggcagcttgagtatttgggctccttagggctagagggtgggggagcaaggagagattgttgagcataggagagagagagagacagacagagaaagagagacagagacagagacagagagagagagagagaaagagagagaccgagagagacagaaagacagacagagagagaaagagagagagaaggagagagacagagagagagagaaatccttgtttttgatttggaacaaaaactactgctgcaactttggctcgaaatatgcaatcaactgaaatcaggaaaagtattttgaatacaaaatttatattgaaatacttgaatcttgatacgtgtgcacccacatacatgtatatatttaaatcaaggatatagataatgaggaataaagcttctgtcataaaaatattgcctgcagtatttgcccttagataattctgccacattggaatacagttttgtactgttaacatttccatatgagacactcttgcttgtttttacaactgatccttgatgataacagcaaatgaggaaatggctctgatttacctttgtgttaggaagatttggaatccatcgtgttatttggtgcaggaagcattttagtgacctactcctttactggtttctggtctgtctctcctactgcgacgtaagagtggtgagggtaggggcttatgtgttttgttccttgtgatttcctcagttcctgaaatggtgcctgatgcacaatagcttctcaataaagctttggtgactagatggatggatgggaggatggatacatagatgggtggatggatggatagatgggtggaggggtgggtgggtagggtgatggatggatggattgatgaatggatggctggatggatgagtggacggatgaatagatgagtggatgggtgggtgggtaggtgggtagatggatgggtggatgggtgggtgaatggatggatgcataaataaatggataaatgaatggatggatggatagatgaatagacggatggatgggtggataaatgggtggattgatggaggatggatagatggatagatgggtggatggatgaatagatgggtgggtggatggatagatgggtggttggatgggtgggtggatgggtagatagatgaatgggtatatggatggatggatggatggatagatggatggatgggtggatggatgggtgggtggatggatgggtgggtggatggatgggtgggtggatggatgggtgggtggatggatggatggatggatggatggatggatggatgagtggatggatgggtgggtgggtggctggatgggtgggtggatggatggatggattgatggatgggtggatgggttgatgggtggatgggaggatggatggatggtggatggatggatggatgaatggatgagtgggtggatggatgggtctctatctcaagccctaacatgtaccttagaatattgggctcattgatccaaatgaaatctcacttttaccatctattcattcattggcctcccaaacattttttgaaacctttattttcaaaatctaatgatcagttataacaaggcattttcttttagtctagtgttttaaaatggaaaaactatgtctagaactgtgctaggcaacctctgtgaactgaaaaccaccctgttataaaaatgtctttaaaaatccacaagggcacatacacagatgactgggactgaaggcgtggaggtcacgtaggcgaagatgatctctttcaaagtaggatgtggatgagggatttatgaggctgaaaggacttcctgcccacgtgactggatgtccgtctcctgggcaaacctctgcaatctgcactatattccatgttcttctggagatttttgtgtgtcctcttcagccctgccatgacttggtctctgtgggacttgccactgctcagtcctattaggtcagctgtcttgaggggataggctgaggctctggggagtggggttcccaagttctggcatggtgtatgcaatgtacccatctattggaaaacttattctcagtgataagagtggtccaagttacctcaccttgacttttaaactatagtaccatggacatcatagcagtaccagtgagaatgtactgaagaaaaaagataaatgacctctctgtctgacaatgcatagcaaaggtataggctttggaagcagatttcctgggttggaaccctggctccaccattcagtagctgtctgacccagtgtcaaggaacttgcacctcagttttctcatctgtaaattgggaacaacatgacagtctggtagattacactgtgtgatgcacttaaaacactgcctggttcaaagtaggcatttagtacaagcatggcaccgttgttattttcatttcctctattccatcatccttccccctttctccatctttattcaagattaatgaaaatgtaggccattttcagataattaggcttttcctctcagtctcataccagtgctaggaaccccaagatgttgctaggcatgtggtctttccagcatcccttgggaccttggttagcaagttcagagaatgtcagaaagggtggtgagtttcctaagccaacttctccatcccattcctttgtgaaggagcattgttgacacatcactgggggcttgggatttgcttggtgtttggagaacgcattctgagatggatgccacgtggtcatggtgggtgggtggggacagccagcccttaaaagggaggggaggcctgtggtttttctcctccaccccctcacaaatgagactgttttccaccatggcccggttttatatttttagcttccactgaaatttaatgttttgtttttggtttattatgtatgcaagtatcttgctgataaattacatgtgtaattgtaccatcgtaaccactgctagtcagcgacaacatataattaaactcacccttgtagtcattgaacttttctgtccctgacaagatcactgaccactccaaggagggcatacctccacgtatgagccatgcgagtgcctgagaggccggaccaccccgggggcccccgtgctttcctgcacatgtgcacaggccgacttcccctggatggccacacatgggatgcaagggttagctcatgaggcccaggggtgcttctctctttatttctgtgtctatgcctggatgattattggctccagagtgggtgcctggtaaatacttttgtgagtgaattggaattttcttcagtcgcctctgagccctcttttctcatatgacccccaatgcctatcccgctcattttttaggggtgtttgttacgttgctcttatgcctctatgccaaggctacagcctgtgagtcacatccagcacactgcctgtgtgtgttgggttttttgttttacatttaaaaatttaaaataattgcgataaaatacacataatataaaacttactatcttgaccattttaaagtttagagttcagtggcattaaatagttacatcactgtgcaactgtcaccacctcccatctctagaacgttttgaaacggaaactctatacccattaaataactccccattctccctacccattccaggtcgtggcatccactatgcacctgtctgtctctgtgaatttgactactctaggtactttatataatggaaccatatagtatttaacattttatgactggcttattttgtttagtcgaatgtcctcaaggttcatccatattgtggcctgtgacagaattaccttcccttttaaagctgaaaaagattctgctatacagtatgtatataccacattttattttactttttgttcgcttttcttttattttgggacaggatcttacttttgttctccaggctggagtgcagtggcatgatcatagctcactgcagccttgaactcctgggctgaagtgattttcctgcctcagccttctgagtaactgggactacacgtgcacaccactactaatttaaaaatttttttgtagatatgggatctttctatgttgcccaggctgcacttgaacttctgggctcgaatcatctgccagcctcagcctcccaaagtgctgggattacaggcatgagtcactgcacccggccccctatgttgtttatccactcacccatcaatagacacttgggctgcttccacctcatcactcttatgaataatactgctgtaaatgtgggtttatatgtttcttttttaaaaaattttactttaagttctgggatacatgtgtagaatgtgcaggtttgttacataggtacacatgtgccatagtagtttgctgcacccatcaacacatcatctaggttttaagccctgcatgtattaggtatttgtcctaatggtctccctccctttgccccccacccaccaacaggccctggtgtgtgatgtcctgctccctgtgtccatgtgttctcattgttcaactcccacttatgagtgagaacatgtggtgtttggttttctgttcctgtgttgtttgctgagaatgatggtttccagcttcatccatgtccctgcaaaggacatgaactcatccttttttatggctgcatagtattccatggtgtatatgcaccacattttctttatccagtctatcattgatgggcattttggttggttccaagtctttactttgtagatagtgctgcaaaaaatatatgtgtgcatgtgtcttcatagtagaatgatttataatcctttgggtatatatccagtaatgggattgctgggttaaatggtatttctggttttagatccttgaggaattaccacactgtcttccacaatggttgaactaatttacactcctaccaaccatgtaaaagcattcctatttctccacagcctcgccagcatctgttgtttcctgactttttaatgatcgccattctaactggtatgagatggtatctcttcgtggtttcaatttgcatttctctaatgaccagtgatgttgagctttttttcatatgtttgttgtctgtataaatgtcttcttttgagaagtgtctgttcatatccttcacccactttttgatgggtttgtttgtttttttcttgtaaatttgtttgggcctatatgtttcttcaagaccccactcttaattcttttgggtggaattgcgggatctatggtaattccatgtttaattttttgtggaactgccatactgttttccatagtggctgcaccatttggcatttctgccagcagcgtgccaggcctccacttcttccacacccttgccagcacttgttttttccatttttatgctagcagccatcttcatgggtgtgcagtggctcttagtatggttctgcctgttctcatatggcctatgatctaagagtggcttttccatttttatatgattgaaaaaaatcaaaagaaaaataatatttcgtgataccgggacattgtatgaaatttaaatctcagggcccataataaagttttattggcatgcaggcactcctatttgtttatatgttgtctgtggctgcattgacactacaaaggcagagttgggtagttgagacagagactgtgtggcccgcaaagcctaaaatagttaccacctggcactttatgggaaacccttgccaatcctgccctatggtaagtgttatatgctttatctgtttaacctcctctctaatccattttgcagacacagaaactgaggctcagcaaagataagtaacttgtacaagtcacatgttacctaaccaggacacatgtacctgtctgtgtgactccaaatcttgcactcctcactaccatattaaatgaacaaaatcatttgaagattgctgtttctagggaactgttttttttttttctctttttcttctttttttttttgagacagggtttcactgttgcccaggcttgagtgcagtggtgtgatcactgcagccttgacttgacttcctgggcccaagccatcctcttgtctcagcctcccaagtagctgggactacaggcatgcaccatcacactactttgtttgtattttttcgtagagacacgtttcccaggctgatcttgaaccactgacctcaagcgatcctctcaccttggcctcccaaagtgctagggttataggcatgagccactgctaggcctctaggggacttctttgggtgtttttagtaagcctgaggtcaggtcctagttgagaaaaaaaaaattgtaattatacaaagatgtgatgttgtctttgggagaggaagccaattgagggagagaatgaagatggaaggagatgttaggtgagctaagctttcctttatttcttatgttgaaattctaagacccacgccttatgttgcatggcaagatgagctttcaactctaagaaggagatagttttaggatgcaggcatgtcaacacgcacaggatttcctcaggattagaagaaaagccaaaccaatcaataacttcttcttgcattaaaacagtgaattatttccataaccgagaggaaagtaagccagggtctacaagggaagctgttgattgattccttctccttcattctttggatcgcatgttgtttggggtgaatcgtagtgtagatacctttggcccaccccaacacatttttccccaaatgtaaagatctgctctcccatctcccagaggctgtcttgggcactccttttgcctctcgggctctgatggtcagtgggttcgttgttactgatgagggagtggttagttctctctctctgcctcctccccttctcgccaccctctctgtccaccaggatgtgtggacttggtaccaggaaccttctgatatttcttgatacagaggacaaagcgtggatagttatttgttctttcttccacgggagaaaagtcttaattgattttacatatttctgtgcattatggaaatcacccatcagtcccaagtacttaggggatgttgggggctgcaggaaatggctggtcttgcgtctatctcaggcaaagagattgtggttctccttttatgtttgggaatgcacgacattccccccgcctgccagcccccagtaactactgtatttcaacaataggcttcacgcggctgcagtgtgaggcacaacagtggttttcatgaacttttggctgtggtttaggcctggcagagctggactcttacccttagagttttctggctcgattcattttgcacaaaggaaagtacgataatcggagttgcaggatgataatgtgatcggcatgttagcacattgcaagaaagacagaaatgactttggagtttgcatttcatccttgaaaatgtgcagcgctgcctgagccaaggggcttgtacttagtaggtgcttgctaaatactggaagaaggggtgagggtggcagttgctttgtgcctgagaagaggcaggagaagtatgtgataacctatgcccatacattttggaaatagggatagctattagattttttttttcctgtttaaagatgaagtttgggtcttgacctggtgttggtctctgcctgcctggttgcccagcaggtggtggtaacatggccacaaattcatttgaccttgagttccctgactcttctactccgacggtccctgtctttcactatctcttgccaatgagcagctaagcatttattgagggtccctgtgctcagctctagagggtggggtgtggcccccaacacagaggagcttgctgcccagaggagagggagttttagctggggaggtagaggcacgtgtatttgctgaggtggccgtgaaggggtgcatgtgttgaattttccctacccccaagtcatttttattttcttcctgcaatactgcaagaaaataataaagtttttctaatgtggatgtgtgtgtattatttcatgtctgaaaacagttaatagtacaaaatgatgctcttgagtgagctgaactcaacagaataatttttattcctcaacagaatataacttgagacaatattgacagttaaaaaatgtaagtatggcatatgtgggaatcattcaccaaatttctgtttctcctctctaggccccaatatgtgtgtgtgtgtgtgtgtgtgtgtgtgtgtgtgtgtgtgtatttaaacatgacttcaatgtttttagaaatgtgacatcctaaatatgatcaggtctccagtaacaagacagtgggtggccaatgcccccatgagtggcagactccctagagaaggttttggaagtttgcggaattcttacaagatacacctgccctgaccctccaaactcaactcctgcttccttaggtggggcgcactcctccctctactcctacagggactgaaggctgagagaagcttgtgagggaggttgaggcaggcatgcatagatggaggctgcataggtgtgggaaggagtgctgctcttggagtgaggaggctggttctgatgtctatctgcagtcctcagcctgggtgacattggagagcctcaggccattgcagctgcaggctgctacctgaagggtgggtgtctaagcttctttgtaggtcttaaacagaatgacctagaccagggtgtcaggaatgtacacacagagccctgggggtcttggtagcatgcagattctgattcagcacatctaggggaatgagattctgcatacttaacaggctcccaagagatgctgatgctgctggtccttggaccacactttgagtagcaagagactagagggataattctcaaacttggctatcaattataacaacacagggagcttttaagacccgccaatgtctaggtctgctcccaggccaatcaaatcaggacttgccctacaggaaacagtgtgattggaggcgggggtggggaggttgtctgctggcttgtagccaaggtatgaacggctggggtagtgtcgtggatctccaacttgggcaggtgtcagaattgcgtggagggctttgaaaaaacaacattgggccccaacccacattttcagattcagaaggtcttgggtatcgtccaagaatttgaatttctaacaaatttccaggcaatgctgtttctgcggccccagggactctgctttgagaaccactggtctaatgtaatcccctcccagtggatattcatgaagcagaaacctccagggagtgggagctgggggctccaggacacgcagagccctgcctctggggtcattccgtgcacatctgttttacacagtgagcagccttggaaaactttcacttgaaaaaaatgtgggtagaaaaaaatgtttgaaaacctctgaagcaaaggcaagacttttaatcatgggaatggtgaatgttcattctttaattgaggggcaaagcaggcaggatccttggtccctcttgttgccagatgtggccgtgtttgctcctagtactgccctgtcctgcaggaggtgttttccatgctgaactcctggctccctcttgcatataagagttcacacctgtccagaggcctccatggggcccagaccagtgtcgggcagggcaggttagcttgcggggaaatccaatgtgtgcagctgctagcacctaatgactgtgtactgggcttcaagcaccgtgctcatttatatgcatgatcttatttaattctgtagtgacctcatataataagtactgtcattatcccatttcagagatgagtatttgatgctaccttccagactgacagtgtccaggaaagcagctgcagtggaggtggaagggcagtaggattccctgattggtaagggcagtggaatgtcatggggaagactttgtccttgttggtgtcttgggaagagagcagaacagtgccctgtcagccctgcaggtcccagaacccactacctgggccaggtgacagaactcagagcctttggctgcttcaggagatgtcaccatggctgtctcttcttggtcaaagttccagttggccaagacatcctggggaaaatgggcagggaggttcctcctgggtgaaacccttttgtatggctcttgacagtgcagaggggtctgggaggagattctgtgaactagccggggtgaagggtgggtggatctctccagggctcaggtcctgtttctgtggctgccatctctaaccatggaaggctggcttggacagctctcagcttgctctctacccccagggagcctaaaatgtgtccaaagctgcaggtttttgctgagacatcatgcaaaagctggttcttctccctggtcacctaatgtgcttggggcagaggctgcgagccttctggttggaggaagggaggcacagatgggtgtgtggtcttccaagcagcatctaggtccttctggtggccaggggatggcagcatcctttcgccctcatgggagccaccctctgtcacctgtgtatttccctgggttcccttcatgggacttgggcctcgcctccgtatttacagctgatgttggcagtggagaggggaaggtgagagtaaaacttccagaagaaaagcttcctatgaggtgtttgagatgctccacgatcaggcacgaggccccagccagggaagacccttccagtggccagaacggtgctgcttcccctgtacctaaaacatctccctcctcctccaagagattttcaaaagagtcttgaagctcagtccgactgcagcccaagcatctgcccttcacttccatcttcaacttaaatgagatgcatttaaggaaaggctggcctggaaactactgtgatcagtaccaggcacctttttcctgaagtccttttacatctaaaaaaggttcatatggttcatcaccatataatcccttcgtatgcctggaaatggtacgtgggggaaagtttacatccagtttaacagaatttctacttaagtgctttttttaatggcccacgtttgatcttaagccacttctttttgaacccttgaaggttttattactgaactttaaaaagaacattcaattcagagggctggcatgttcttgaatggagctgcattttgaaagaagggagatgaatttctttccccagcagagacacaggtgtcacctatcaagggtggtcagaactctattttttcctcagtgtagcaccaggatgtagtgactttctctctttgaaggactaggcatgcagatattattgttaggatttgtagaaatgatggccgctcgagtaaacgagtggccaggagctgggggtggaaattctcccacaggtagccctttctcaagactaaatgaacatcccaggcagtgaacctgcctgtattgttatgcatgtgtatagcatgggagcttgggcgccaggcagcaggagccccctggatttgcaccgtgccctttatgagttaaattttccccacaaacttcatgccttttttttttttttctcaagacggagtcccccccccctctgtcgcccaggctggagtgcagtggtgcgatcttggctcactgcagtctctgcctcccaggttcaaaggattctcctgcctcagcctcccgagtagctgaaattataggcgcgtgccaccatgcccggtaatttttgcatttttggtagagatggggtttcatcatattggtcaggctggtctcgaactcctggccttgtgatcagcccgtcttggcctcccaaagttctggggttacaggtgtgagccacctcgcctggcctcatgcccttctttaaggaatcccaccgggtcctctacagtaccctcttccctttagaatagcgggctaattccaggtgcccattagaaattcaagatgtatcaccacatactctgactcaagacccttggttgcaactggaccataggaggtatgcccaggatgtccccctgtggctcacaccccatcaccagctgtgcagaggcaccataccctgtctttgctttgccatacagtgcagaggatgtgcaaccaagaacaggtctcttgatgaccatttgcgtgggagtttcctaatgctggtagcgttggggtcagaatctttacagcatcctgggctgttgaaagatctttgtcaactgcagaagaacggtgtgctgactccttcatcctgtctcacaccaaagaaacttttttggtatctaggagacttgagaccaaggaatacattatagcgatggtttcaggattgctgggagaatctgtttcaggtgtaggttcccattccccatatctgcaggtatgccagtctgggaaggaacctgggaatcttcgtttctcccagtctcctttggcaatgccagtgggcctggaattatagtaacactaaacctaaattttagtgggtggacctcagaaggctggattctggaagcttcttacttacttctcagctgcaagactttgggtcaaacatttttgagctctgttttcttacccgtaagagaaattggccctatatgacttctaagagtccctccaattctgaagttgtagcacattaaaaataatctgcattttaggcctggcaggtcacattccctgccaaagggggggcctgggaaagaaaaagactctacaatgtgaaagtgtgggcttcgtggtatgaggccaagtttataaaggtagcctctgtgaaagaatcatttgtatttattgaaatcactgattttaatcaccttggatgctcccttgataaaaattataatcctctgtaaattatgaataccttgaaattcacaaattctatcacttttgtgattggcaacattaaatggcaacagctcatttaaataagcaacatctggacattattatttttagggatttttcatctgttgatttagaaatctggggcctttatgaatcttgcatgaatattcttttatattcacatctaccatcaagacacaaagggatagccaaaaatattgtccagtgactctttgatgcaatgaatgtgttttttaaacaacaaatccattgtgaatgagagaagatataaaataggctgcctgtgagggtaggtggtgggggtagcttgatccttcaaaagccagaagagtccagcaattcaaagccacagtggggagaaggtttagattttatatataataatataaaattttaagatcacaatatgattttggactgatgatattggaatatggcattcactagttctcagaataatccaatttagaacaatgcattctgagcaggtttggtaaaaatagaagatctatcatcccatggtataagataatgcattaatttttatgagtgagttatgaagatgtacaactcggttaagagttaggataaacataatattccttaattaatccattatgccatggtacacatgtgccatttttattaccttaaaaatgaaatatgtcaaaaaaggaaattgctgcttttttatatcaaaaaagccttttttgaaaaatcataaaatgcctaatctaattcaccatataatactaatgagcttaacaagccatctcgatgcacagtttaggataaaaggtcatcagtttctggcagtcaaattccactacttttcagacgaggcaaaacctttcggcaccaaatattggaaatggcatttgtgattaagcgttattaatagctatttgttatgagcgtgggagagttttagaaattcatattataccctcctcaagttttctaaatcttaccattgcagatgccaagagcaggcatttccccccgtcccaccccggtgaatctgattaacctgttgtccatcccaattctgggtggtgttgaacaggaatcttacattcacacagcgctttccgtttcatgccacatttaatttccccaaatctctctgaatcccctacatttatttcctggggtctctttgctctccaggagccttcctgtcctctgtatttgccactgtcatctgcctggtgtttcttttgtcttgtcacagaaccggccctgtggaggtacagactgggcaccttcggccgcagtgcatgcagtggctgcagccagcctcgttatggaaaagaattgcccagtgggttgagggaatgggcaacagcacactagaatcatgaggctgaaaggaatattgccgactggaggtcatttttcccaactgaggggcaatagtttgccactataaactgcacattgcagtcagtatatgttttattaaaccatttaaggaacttgggagccatttcatttaaacttcctgcgtgaaggaactcagggcagagcccagagcagctcacaaaagaggcctggagtaatttgccgaagaaataccccaggtacccggcaggatgatcgcaacggggggagcctggcgagggctggacccagcgcttatagtactcttcgacgcctgagtgcacaagtgtgtgtgtgtctggaggttcgagtcctagctctgccgctaactagctccatgaccttggtcaaatctcttagcttcccctggactatttctgctgctgcaataggaggggatggggtttgataggagaggctgggtcctttccagctcagtgattccataaaatgctggatcatcagggggttgcccctggaactgtggttctgggacgccccatcaggcccctgatcatcacaacggaaagtcagcttttgtgtctgccctgcctgggaagtgattctggctgtggacgttttcataggctctggggactgaggctcccctgatccagtggtgacgtgcgggttctcagcatagagcagggaaaccggcgacaacttacttctcatattaaacagaaataacctcttcacatgataattttatgtctgaggaaataggaagctgaggtgcgtgcactgtgcctctgagcctcagttattctgtctgcaaaatggggtagcggcgatgcggacgctgttgctttagctgtaaagggcgacagaagggatgccctgggtcccttctgttatcactctgggtaactttgtgattacaatttagctttaacaactcttgcgaattgcatgactgcacattccgtgttcacagtttgtgcctaggaagaaaggaaggatgaggtgagatgtgctttatctttaagagtaatggacagagtgcaatctgcattgtagctttctcagccctaactggtggtccttagtaggtggctttaattctacaaagttatataaccgaatcttttgtctaattggtaactatatttaggaggtagagaaatatgtgagctattcgtttcgattaaattttttattatgcactctgcatttggattgacaactattaatattaaagagcttggccaaattgaaatttgtattgctggagagacttaaatataatgtatgatgctgaaaaaaaaaaagcccagggaaaaggggaattaccaggctgggtgcagagaggtccctgccaggtgccgatgtgggctaggtagaatctgccccacctctgcacactgaggagggaggtgtgtagaggcctctgcaaagccagtgtcaaggtctcaaggattgagatactttcatagagatgatgctaaataaagatgtagagcacgttttagcaacgtatacaaataattttttataatcactgtttgtatataatattttttcccagcactattaagaaggtttgggggtaaggcagagaaagtcgttctaaaataggatgcatggagcactggtgcaatgatgtggaaaagggaggacagcttcctcggaaatcctaacgcagattgtgttgctctgctgcaagtcctcgggagatgggaggctctgtccgtcctgcggcagggagggctcaaggccacagccaggtggggaacgtgctgggagcagattcctgggcatcctgggcctgctgtgggcaggccctgggactcacagccatggttctgcgtctttggggctgactcctttctaactcctagcaatgcctgtggctttgcacagtgacctgggttgtcacatgcagaatcctataggatttgcacgaagacccgggtggtcctcagacaggggaagtcaggtgtctgggtccatgcggccactgaacagcagacacaggacaagaactcagttctagaatgcagtctgtggggcactctcaagagaaagtgtcctctttgggagtctacaatgctacagggccaagggtgagcccacgagcctctggcgtctgtgccctgttagctggtctcacggactccagacacctccaccttccacgcattttctcttgttgggccctctatatagaatgtcagccccatcccaatcctccagataaacccctcaactgcccccagggcctgcaagcagagagcaatcagtatgtcctgaatgggtgcagcagacgcagtgcaccagatttgactggcaagggaggggaagacgaccctttcagactggtggtggccttacgtccttcatccctttttaccccctgctgaactataaactctctggtggcagggacatttttcttgtttttacataatttttcctgacattgggagctagaatatcaatgtaagaaaaccttcatagacaggggtgctcaaagcattggtggttctggctcaatggattttaggcacacacgttttcatctccatttggcattttgaagctcccaggagctcctagatgggtgatgggtttctgaggctcggctggtgtccagggtctcctgggatggggacagagcacaccaccttgtgtctccactgctatacacctgctccatctcccagagatgaccccagcttctggagggcaggcgccttccttgtcaccccaccagttagctcggtggctggtgcatctgtggccatggcaggctctatgtgatggcgagagaggcagggcaagagaggcagtgcgggaggtgcagggcaggggccttggcgctgcctccaggtttctgtgatcagctaggttcctagcttctctggagagcagacagcctggggggttgtttcctgaaagggaatcaggttccctgtttgctttttgacacttttttttttttttgagatggagtcttgctctgttgcccaggctggagtgcagtggtgcaatctctgctcactgcaacctccgcctcccaggttcaagggattctcgtgcctcagcctcccgagcagctgggattacaggtgccggccaccacgcccggctaatttttatatttttagtagagacaaagtttcaccatgtcggccgggctggtctctaagtcctgatccacttgcctcggcctcccaaagtgctgggattacaggcatgagccaccatgcccagccgacacttttttattaggcagggatagcagatactatcggtgccccttggcagccactcaccactcagggtgaggcttcctcacaccagcatccacgactctgcctgggtgtgtccttcgtcactggtgtgtgtctagtctgtcatgggggcaagcacacgtgccagggagttaacacctctggagcacccctcagtcgatggggatggggactggtgggtaggcagcggtctcctctctccctggatggagcagcgtgggggagtcccgctcagggtcttaagagttcccggttggactcaggcctggtgccctcagtgcagtgcactttttagcctgctgtgcacaggcctcctttctttccccacctccccactatcccctggcattttctgggactacctcctgcacaaactttcgcacaaacttcctgcacaaaccgcccgcatttgcatcttcatctcaggccttcctctgagaaaacggcgcagacgaaggccagttcaatggagctcgaaccattggagccgggctcacacacaatctgatggatccttcttaaggccaggtcccttaggctttctcatttgagccttccagaagcctttgatgggagggagctgaagttgttatcccattctcctgcaaggaaagctgaggtccagagactttgcagagctagaatccaacttcctgcccagctcctgccctcctaacttcactgattcaacaagggggagcctgggcctggacctctgcgggggccaaccactgcctgtccccagctaaatgggagggagttagtgagttatgtgacccagagccggctgctctgggggcagttggggccagcaggtgaggtgacctggtagggtccctgagcagtgctttgctcctattaagtccaggaggaaagcggtgaggggagagggctgtggctatgtgctagaaaggatgaaagcctggggctcacagaactgccccacgtggaccactcagcctgcaggctcttagccgctgcaggcaccatctgggggaaatgatggacggtggaccagcccaagttctcatgattgggctggagagaagttctaggggcaaagcatatttgcatcttcctgacagtttgcaaagatgcctctgtcagaggagtgcctgttcttaggaggagactgcttggggcagacatctcttttcccagctcatttgctcctctgaagttctgcagaattaagagcccaagggagtagcccagagaggagtaggagggctgaagcttggaaggcaggaggctgagggttttgctttccattagttccagggcctgaggctgcattttctcttgtctgggccttggttttcccaaatggactggacagtgtgagttccccactgtagttgagtagttgaggaagctcatatagagtttgggctaggggatcacctgccaggagtgagcttgtgcaggggcaagagtgggtgcaagagagaccgtgggaagggaggggagctagtgtcctcgcttgaccctcaacccattcctgactggctcagtttccccaattgtacaaaacaaggaaggaaaatgcacacttcactgtgtatggggaggggtggaaagtattctgttaattgagtcaagtgcttggcaaatggaggtgtgatctgagcggtgagcagctgggtatttaatgttcttaggagaatcagctcaggctgctctgcagtcctggctttaagcccctgagatagccctgagcctcagcccccttcatcactgagaagctgcaggggtggttgtttcagctttgccctggcaccaacattggaggctgagagtgtttcttgggccacagtctcttgccaaggttgggttcagagggtgaccccagatctgggtttggggtttggggtttgggagcccactgttcaacacctgaaggactcttctaggcagaattgggtgggggaccaaggcagggattgggagccatctgccctggcccctggtaggcactggctgggcttcggcaggaggggccagcgtgggtgaggaaaggactgtgccatcaggcgccctgtcctccctcggtccacccgcagtgtagagcctgggccaggcatggagtggatcctcccgacgtatttagtgatttgatctgacagagggtcacatcggtttttttcccccctccaaattttaatatcagattcatttattatgctgactgcaactgacaaatgttcacattattcacccatttattcatttgctcatgaaatctgtgttgagtaattgttttgccttattggcagttttaattctacactcctttttttttcaaaaggtcagtggcttgctagctgaccaggccagtgtgtgcattccctggagagaatttttttttttttttttttgtaaagagatgcttgtttacactggtcagacttcagctttgagtttctctcttcttttgttgccttggatcaataccttggaattcccaggactcagtaaggctcttgtcttatctctctgtcaccctatttcctggctgaatatctgagccatctcaccccacagtcagattattctcttttctctgcttattcatgtcaagctaagatctacagacacaccaatatcaaaatgtatgtgtatgtcttgggtttgtaacacacttacctctaacacgttgatagagctaatgaaagctgtcaagtttgaaatgtctctggatttgcttttggcttttgcctgaaagtacatgagattcaaggggaatatttcacctgcgactttgatttggaaaattgaaaagttggttataagtttgtttgagaaagaaggcgaaaatgttctggaaaatatagttccagtaaagttacttctgagctgaaacattcaaaatgcagagatctatagtctggtatgttattttatggtaactttctgtatgcagctgtgtttgctgtgaaaactcacatttctgtatggaacactgaatgaaatatgaatgtgctttttacaatttagtacttttaataaaagatttgtgagcaaaaagcttaagtgtaagagccacaaaacatatagataaaaatatagccataatcacacatcaaaccctagaaaattcagtatgtaaagaacatcagtaattgagagaagttgagggaaccgacagaaaaaattatatttttatatatatatatctctccagaattctaaaggcatgaatccttttagctgggatcagggcttctgagttctctggagtgggtgttttattacagtggatgctttacttagaaggatgtaatttattatctcgaattcgcatggcaacatgaatttggatttgggtttctgggagaagtttacaattagtcccctcacatatatttataactttgaaaaaacacttgatgttaaaataacttaaatacctccccccccttttttgattgatatgtgaaatattgccttttttaaaaagaaatgaaaaactagtcactgctaaatgaggcgtggccactgtgttcagggggaacggtgattaggtgggcactgttcccagggccagaggacgtgcaaaaaaaaaaaaaaatctgttctgcacctgctttggctttacatgagggatgcttttaatttttctagcttttcattgtttcctcattggaaactcctctcttctaaggagagctctaacagagggtatgaggaagatgtgccttttttttcctctgttcctggtctgccacattcacccaagagtcaccctaaccgttcattctgctgagagccccttctcctgatacgtccctcctgcttcataacattctcagtgggctgtgattgctaccgtttttctttttctattaaaatacagtccgaacttgattatgtgtttcagtatttctcagcctgacccacaagtaaaaccggcgacaatgatttagttattggctcgtgtttattgccaatgcaataaggttgtggtgcctgacattttcttctcactgtgttgaagcttttagcgagttgctcttcttacccagaaagcagcgtaacttggcctctctttgcagatgggttacacattcctttaacactggcatgctcctctaaccttcctgggtggctttcgatgacttaaacacagtaattggcatggaggtctgaagctttattttatgatattaaatcattcttttctggaacagaaatctgcaaagtataccattcattatgctaaggcctgtattaacaagggctctggctgatggctggtgacatcttggagaacttatgtagcacatctcaagggaggtgtcagccctcacctgtggaggtgagcattagaaccaagagcagaatccaggattccatctgctgtgtttcagggacagaagtgtatggtttgtcattgtgagcttggtgcataaagggtaacattaccctaaaaatactcacaatgtggactgagatgaacttgattgctgtggcattattttagggggacttggcgctttctccatgtaatcttgtgaacattttttttttcatgtgaaccatgattttcttgaaacaaagaggattatcagtcataagttctgaagactgaaatggggtgggagaaaggtttagaaggagaagattttttaaaggacttgcaaagctggcactcaactctagctggagagaaattcttgagttgggcgccatcttggttttgttgctccagggcagtgagggaggggatgggagattttcaggtcctcagagtcctcatgtgttccataaaaatgggttcctgtagcccatagacagctactagagggagttaaggcctgctaggaaagccagtgagagttctctaaggctccaagttctaagggttgctcctctccagacagcttgggaactgcaagccactggaagtcactctgtggtcgcacagagctctgcttcgagtccagcagtctgtgttttgtgcggtctcactctaggctatgttcccaagtggagcaccatgatttcctgtgaagggtccatgagatagatctttggtgatgaggccagcttggagaaaatggcgcttgagaatttcttatgatgctattcaatgacagtgtgattcgtggcgtccccccagccctgtcccctgcccaacttaaccacacttggcaagatctctgaggagtcctgagaagaagagtcctcaggcaacagcaagactttcccaccctggtctaggaaaaaagttctggaaaagacaagaagtccatcagacacaaaagaagacatgtaaggggaatcaaaacaaacaaaaaagctatgaaaatgcagagactcaagaggtcgccaagcgaatgaaatgacttaaggagtgatatgtttgcttcatctttctggttgctctctgaatggtctctgataacacattttagctgtagaaatggggaaagggggcaaagacaaagttccgggaaggttgcaagagataactggttatctaactggtatcccgggggccagtgtggactcgcttctatgtctaaaaatgattttgttagtatgtaggtcacattactgtgctgtctggttattggacgttgcctcagataactgtttgtggagtattaaatggttctgctgcctcagcacactttttcactggtatttttcacacagttgtgcggctgaaaaggcgcactgctgcagcaaaaatcaatttatctttccctctgctacttgtgtgctgtgagttcttgtagtgttttaccatttgattaattgatattctttgtgtcggacatcatttgtaacactgctgtccaactttgggtgtcttaaaaactttcgtaagaacacattatttatgtgagacctcctcatgacaaagtacaatagtgagatgcagaaagaaaaattagatcgaaatgctcttggcttataagtttattaagggtggaacaatgtttccattcacgtctccctcctcccttctgcatccctgtcgcagggtgacttcgacggctttgctcgaaaagtttggtgatgaaagtttttccttccttggctttttctgggtggtggtcttttgggattagaggggcttctgattgcctttcagatgagaaaagtgggtggggaggggcagggacaagtgggaagggtaggcgtggcgtggaatgaatgcagaggctgccccatcagagtcctggggttcgagagctgggagcaggagagagctccttctccataggtctctcccagggccttgctagatggttttagtataacgtgtttgcatgcatttcacatggtgctggtctttccgtgggtattattaatatctatttttggagcaaagactgtgtcaaatgaaggtacgccagccccgcgttataaaaacagaacaatactgttgcttccccgtttcattataaagtttctttgaccctgtggtttattttcaaacattcaagttatttgttctggtgtattcttaaacaggggttgtttttctccctttcagaaaatgagcacagatggtgatggattcttcaagtgctgacatccctgcttgagaaaatgttcccaccttctttgtgccgaacaagtcaggcaaactaacatgatgatgcgatcatcggtttcatgcagacatgcagaattgattgacaggggaaaatttaacataaaccacacattctttcagtgccttcaatttcttaatgatgtttatttgttggatattagcagcggcaggaatttcatttaaggcgaaaagtggggagaaaggagaagacggagcaaggggagagaacttgttccaggcaagcaggtttaagaggaaatttactgctctggtagaatctccatcaaaacaatttgtaaccgctcctcggagccagcttggagctgaggctgtcagcggctaaccagccattctcagaccattgcttctgtttgcgtgactaaatacagacaattaacgccgagcactttcttctctatgaactcattgttatccagggttcaagtgctcggataatgggccacagggaccatgggctgtggcggagggctactttgtaaaacccattcctcattatctgatgtgagccctcctgggcgactcagggccccggctcccttgcccgtgggtttttgtaaggttggttcaggagatccatcgttccctgatgagcctggcctgacgcttggatcctgagggagcccttggtccctagggcctggaggtgacaggcgtggggaccttgtacagggcatggagagtgaccactggcgctgctcatgcctccagtgactgcctgcctctagaggggcctctctgtgcttcctggggctgtgtctgtctttcctaatgctctgggcagaggtggagggagatcaggagcccatctgtccctgagctcctgaccatggtggcccttcctactgaggactggttataagggccctgcaccccaaaaaggcaggtgcccttttgccacccctgtgtgcagttcagataaaaaacaatatgaagctgtagcattaagtgtggcgaagtagaagaaagttctgagatttaatattttctcccaaagcatcacattgtttcaaatattttttctcaactttgtggggcctgcactgctctggtgccctaggcaggtgcttagcctgctcactggataatctgcacctcatttactccccatatggtcttcgtgtatttccttttgccatatccataccctcctattatttgtttaatattttcattgaagcagctttacatcaacttctctctctctctctcttcccccacccccactctctcattccccagcctgatacctgcccaacttagttagcctagtcctaatgttgctgtgagatcatgggttgaaggtgctagttatgtttccctgagtcacattaaagtaaatgcaagtggactattaaaattttaaggctaagcgtggtggctcacacctgtattcccagtgctttgggaggccaaggcaggaggatcacttgaggccaggagttcgagaccagcctgggaaacatagtgagacctcatctctacgaaaagttaaaaaaaaattagttgaggtggtgtgcacctgtcagcccagctacttaggaggctgagatggaaggatcacttgagcccgggagttggaggctgcagtgagctctgatcgcaccactgcactttggccagggtgacagagcaagaccctgttgcaagaaaaacattaaattaaattaaatttgaatgagtgagtctcacttcccatcactggtgcccgtgccacggttttggacacctgggtacagtttgcacttgccattttgcaggtggagagaggcggtgcatgagagaagatgagcctttccaggatggcgaggtgcatgtgaccttaactgtggggagaagagaaggtctgtgggcaccccaggatgaacagagggggcggggatggaagggaagagggggacgcgccacaactttcccggagaaagcctgtctcagagagtggaatggtggtcctgcctcctccacttccttctctccaacccttgctggcccgagcgcacagagcttcccatgctcacatttggcttccaaagcaacttccaaaaacaagcttctgggattccttgcgatcttttttctagttaagtcagatcaatggagtttttgctaaagtgattatttttctttttgtattaaactagtttaaaatacaaataaaaatcataaaatttacaaagtattttctgtctttgaaagattcccacagtcacctgcatggggggaccaggtgtccagaacccatctgaaggagggtgtggaccacccccactgctcatggtcagagtggctccctcttgcttagggtgaaggatgtgtgctatgcagttgtataatagggtatggtcttcggactgtgcctcgggcggcctagtgggctgggatgtgcattgcacagagagccaggagcctgggttttcccacgaacgcctctgtgacctcaggcagcctccctcctttgctgggaccgtttcctcttttgcaaaatgggtacagtagcatttgctctggccctttgcagggcagggcctgcttcagtccccagacatcatgatggccacacttcccatacttctctccttcctatcaaagtgaaaggccagggacttccagatcccgctggggtgagcctcagagcagacatgccaggcatcatccctgggtctctgtgatggcttagcgaggtgacaaggccgtggcagacacagagcccggggcactcacaaggatcttgccttagcaggtgacacagtctctgcagcccgaggcttggacagagcctgggctgcccagatagcggggtggaggtttgcttgcaggtagctccctgtccaggcgccttgtacagtgagctttcgggtcaaacctttcctgacacagctggccctgcctgggccttctgctggtgccaaataaccttaagtggtaagaacccctagaaaatctactagtggtggctgacttctgcttaggtcccctgccttgtctcctccccactgtgtcagtcagagcaggttgatctcagcctggccacacacagccctgtttcccaggggtcctggggaagcccacccactccgcactctccacagggagcccattctctgagcaaaaccccaagctctgctacctgccaccccctgcaactctcaccctcaccccatgacctccaaagcctcccagggccagagatccctgtccaaggtggggcttgaaaggactgggcaggagggagagcctcacagcctgctgtccccacactgcccaccccgactgtggtttccagcatccctgagaagcccaggccaagagtggcctctgggggtcctcagttcagtgtggcatcctgagtacaggtgggttccccgttaaggaaaagtggtgtatgaaatttgagtctcccaacctgaaggccttctcatgggaccagaggaagaccctggaagcctgggctccgagaatagatggccctgtccctcgctccgcactatgcggacttcagagtaaagaatagaggttaggccataacacagatgtaaggaagttcatcaaagtcctgctgcctcccatggcaactactccaacgctcctttgggactgtcaactccagctcttattcccaatgtactcagctttgaggtggccctgcatggctggtgtgctaagcaaatgcttgctttgcttattggaggcccctgctgtctcctggggctgcaaattggcagagggctctgctcacctgctgtgcagagaacattagagtgaagggcctgggggccccggggacccctctggggcagggcagcagtcctgagctgcaggtgcaccatggtgtccctgggaatggagtctcgagcggggcggtgcgggctggactatcattcgtgcaggctgtggtgtagacagggctcctgcaggttatgccttctggggccctggttccgagactctgcccctcgtcgagacagctcctttgtgagttagctgcagctctcaggtgcccttggtacctgctgccaggtgccacacatctcgagggtccacttatcaggtctcagctctgctgtcctccacccttgtggctgccctcatagagaaaagagccacaccgtgttcccagagccttgtaggcgcagcaccagctcccaggatctgggaggcagagctcagctgttggactcatgttgtcagggttatctttgcactttgacctaagtagctttccctgtgggcctgtgctctgatcccggctcgctggggaggtcccttctctccctcactccaggggcctgggcaaggtgttgggtaggtggtccagggctcttattggtctgataggaggaatgtgcctgtggcaatgagcaagaggcaggctaaggtgggtgatcgcacccaacccctcccctttctctgggtggagctatttgtttgcttgtctacacaggtggttcctgagctcctgcagggtacccagccccgatcccccacccactggccccactctccctgctggctctctacctgcaggccttggcctaaatggcatgtctcagcgaggcctttgtggcccaccgggtcctcctccccaccacgcctactagtttctcttccatgcttctctccccttggcacttctgcttattcttcttatttcactgttttcttctgtcccagattatcagctccttgagggcaggaatctcatgccttttgttctctgctgtattttcagcacctagaagcttgctcagcacataataggtgctcaacaaatatgcattgatggggagaatgaagaggcatggtccttctcttgtgaagtgtactgtccaatgtgagtcacacttaaggagtaagggatgggtcataacagtttatagggcatagtgaaaggagttattgagagtagggaggcgaaggcttcctggaggaggcagtcagggaagacttcctggaggaggtggcctggaaaattgagtcagagttttatatgcagaggtaagaaaaggaaggaaggatgatggtggggcatgagccacccccctctgggccctctgtagcagggtctggtttgagaaggtcaacaggggcccgataggaaggtcctgagtccagtgaaggatccttgtcttggtactggaggaggaggggcagcctgaagggtttcgtgtttcagtgtagttgatttcactgaattacgaaagttctgtgggttcactattaagattcaaacaacacagatttctgtaacgtgaaatctaaaagacccctttcaactctacttccaaatccttctcccatcgatggagaaaattcctataatgcattttggtttggtaaacagcacctgctggactggtgtatatatacatcatgtgtagggtgaatattcacaaaaagaaaatcatgcatatgtattttacataaaattgacattgaagcctacataatgagatcttactatacatattgtcctgagacttactttttttaaaaaaaacagtattgtttttagatcaaaacatcagatacataggaggtgcacacattttttaacttctgtgtaattctgtgtggtatggcatattcatattcatgtacccatatgttggatatgagggaggtttccattttcttttcgacattacgcttaaaatgctgcagtaaacactgtatcacggtaaacaagtttgggtatttctgtaggatagattcctagaagtagcattgcagaatcagtaggtatatattctaattctttaatagacgccaccaaatttccttccaagtaatgttgtttgtgtacattgtatacatgtctaccaatattgtatgcatagtacttacctgccaaaacctcaccaatactgaatgttattgctcctttaaatgtttgccagtatgaaggaggaaggctggtatcatctacttgtatgtccctcattcagagtacaactagctatcttttcatatctgtattgcccactctaatgacttctataaattgcttgttaatatgttttcctatttttctattttttaaattgattttcaagagctctttacatatgttggacattacccctttgttatacatattttaaacatttttggggggctgctgtagagcaagggaaggacataatcagggaaggcttagaaagactgctcaggatggatagggtaggggagggttggctacaaagacgaggtaccaggcagtagtctgggcatgagagggtgaggcctcatcctgttacattacagagcatttgctttgctcttcattccatgggtgccattccaggtgtgtgctgaagacttttgggaaggtcttcaacaggtggtttctggggccacctgagggctggtacataaagcctacatgatttgcctttcctggcctgtgcaggccgtggaatcccgtgctgagcctggtccaggtgggatgctaagatacccgccctgccgtggcatgtagcataaagccctgtgaagcctggctgtggaccctgaggagcctagggacatggggagggggacacagcttgcaggacagcagagtatgggcactcaggtcaaagcgtgggcttggcaaggcctccctttgctcctgatagagagggggttagccctcattattcttaaggtgcccaaagctctgatagcctgtagttcaataacttaaaattgaaaatgtaggttaaaatactgttataaacacctacagccaccccacagtgaagacagccactacaccttgaacccagccctgtctggggtcctagctcccctctcccagaagacaggtgtaattatgctgtttttccacaagaaactgaggggcagggggcttactgtcttgtctgaggttacccagctgggtcctgtcagagcagggacatattcttagccacccatgatctcaagccaccccccaggcattaggagagccccttgcaggtgcctctgagttcagggcagacacatggtaggtgacatgtctctttaggtcttgcacctacaccctggttttacacctgttcccagatgtggagatggcctggctggaagtccagcggcccgaggagtgggtgcctctgttttctcaccccatccttccaggggtctgtgctccagaaggcgtaggccatgtgcgtttgaacccagccctcacggaggttgctggcaatgtgtcttgggcagaccatttgcgcctggctgctggagcggggctgggcattccttctggagggggagatgagtttcaatgacctctgaccattgtctttggagggtttaccttgtaatggagtgttgagtcaacattcagaattaagagcagaaaggtaacattttaaggcatttcatcaattcttctgagacgcccacacatcttgttttccctcttcaccacttaggcagcaatttcttttcttgtttctaacagctacctatagaaaacacttgaatgcagatcatatcttgatggtatttactaatataaatatttgctttctagaagcaatgttacgcaaaatgcctacgctgcaggctaagcgaccgagtgcttgaggtaagaaatgccacctctgtggactggagttggtgtctagccgtctccacagtggcacgcaggatactggcagaacggccaagtgtcggcacatccggcctgccctttccaaggtccttgtgatcacattttttaaaatgataaaaccatcttggccagtttcccccaggaccccttgagctgatggagccctctcccaacactgcatgaggttcagttgcatatttgcccagaactgtgctgtgcccagaactgtgtatgacagccttcaaggagcttacaatgcatgaagatggggtgatatcaaacctcatatcagttacatttatatttaactggtgtaatatccaagaacaaggaaggaaccgggcaaaccacacgtaggtctgaaaagagccaatgaaatgatgcagaccaaggctagggcgggcagatgcctttgcaatggaattagagtagttttaaatatgggctaatttcaagcaattttaaatatcacaagattccactagagcgaaagactgcagagaggccttggagtttgagaaaacagggtttgctgagcttcagtctttgtatccacctctgactctgtgtgcaggctacagcatggggcattgggctaacaagaggcacattaggtgtgtgtgtgtgcgcatgagtctgtgcatacacgtgtgtttgcatgtgtgtgcatggcgcacatgtgtgcgcttgcatgtatatgtctctcttctcttagggtgaggatctgtagaaaattcactgcaatgtacccgcagccctgggtcgtcgtgtcctgttctctgtgggccagtaagcttctcttctaaggtcagctttcttcacccagggccactccattttcagatagactggatttggagagtgcctttggggcagtttgctcccttcttttatatttgatattattacagtttttgtaacccaaatggcattggttttaacaaataaacaaatgctaactgccaacttctttggctggatggacatgaatcggctttagcaagtgaatagatgacatatcaaagaatatgttgactaatcccttccctgtctgagagcgttttccagatcgtagacaaatacactgcaggcatttaaaatagaagtccgggcatggccacaagtgtattctgggagttacagggtccgcacgctctacgcaggtgagtatttctaggagatgccgggaagttggggacacccggaggcaccctccgatgttcagatgatcgtggcaggaacatgctggaatgatattctgcctttatttattatttgctaccaatgtgactatcttttaatttttttaaaacaaataatttagtcgtaaaggctcagactgatgttttttttttgcgaaatagttctagtgagctaatttatttttcaactttaaaacatcagcattttatagatctgaatttcacaatgtgaggatgattgctacgtacaatttgcaaaattgtgattagccagcccttgctttgagttagttctccctaattcacaaaggcttccaagaatagtctgcacaaaattcagtttgcaaattgcagggcagatttttagagggcagtttaaagaatgaagtcctaagggttttatctatatttatatctcttgttaaaccaaactcttatgtaaatgttacaatctgtaaataactagcagggctgccttcttaaaggcaagattgcatctccatttttgagatttagcaaaattattaaatggcagaattgactaagatgcaagtatatttggaacgagctaataaacattaatcaatatcatcagctgtatttgtgtagctatttcagggtttaaaagtaaaggtttttgttgaatttctcataaattaaaacaattaaaatataaaagtcattacccttagtgatgttttggggaaaaaaatggagatagctttgtgtgctcttactttttatagccattaatgtttcagtaaaccttgcatgactgtatgcaatttagattattttttcatccttttgccattggacaggaaggaaattactggctcccatcagtgttactggcaatccccatgttctgacatctgttcctctctaaacattttaccaaccttgatgaaatgtagtttggtgtcagaagctgacttgaagaaaaaaatcacatgattaaaaaaaacattgattaaacaccagaagtcacttcccaataactgtcaatattttgatggtcactgtcatttatttttttcttaaatcctgataaatcgtatagaaatgttaatcatgtttaatatttgaattaaactgaattaatggcatgtcatttttaaatagaagtgtagtggattcattctagtccattttaatcagggtctttgggctacgattcatcaggaatgttttcagtctttctcagagaaaccatgtaacgcactttctttgagcaaattagacttcctcaattctttgtcctctttatctcctggttttcagggaaaaacacacagcatcttgggggtcaggacctgccagaatgaggaactggggtggagcagaggggcaaggggttctctgggctggatgtccacgcagcccacggagcccccgtcagagagccctctgggaggccttgcagatggaacggtgtggagcgtacgtggtatttgggaagtttgggcccagggaagggtaaaacgctcccctccccgacctggattatccaaacgatttccagatttattttctccgtgaaacgccatttggagctctcctcttcttggctcccgggagaatcagggccttaaattcagtgtgtaagcaggagaaggcccactgtgcgccggacgtgtcacaaaaacagaggcacattccacagaggcatatttcaatccattaacccacagaatacgtattgaatggttagtgtgtgtcatgctttgggagtgcagcgacaaacacacagaaataaccttgtcctcctgcgcctctattccagtgacacagaaaaatgcatctcaccatctccgtcccttgggcgtggggccccctcgcaggctctggctccagggtcaggtgtggtttcaggaaatcagctccagctgtgtgacgctgcaaccccgacctcccagccctctcttctgcaaatccacctgccccaggctcatctccttttctctgcaaactcttctctgaactctgagaaaacttggctctggccctacaactgccctcaccatgctcatagtttaaaatggtagaaaggggccggtgcgatggctcacgcctgtaatcccagcactttaggcggccgaggtgggaggatcacttgaagtcaggagtttgagaccagcctggccatcacgttgaaaccccgtctctactgaaaatatgaaaaattagccaggcatggtgacatgtgcctgtagtcccagctactcaggggactgaggcaggagagtcacttgagcctgggaggtggaggttgcagtgggccgagaccacgccactgcacgccagcctggatgacagagcgagactctgtcttaaaaaaataaataaataaaatgataaaagaaatcttcattcggtaccacaaatttagaaaacagatgcatgggaatcaaagtgcccttaattacccctgttccaacacaaaccagatgctaacctctaggtaaacttccttttcatcttcctcttttttttttttaattagtctacctggctaatttaatttttgttttcttttttcttttttttctttctttcttttttttttttctgagacagagtctcattctgctggccaggccagaatgcagtggtgcaatctcagctcacagcaacctccgcctccaaggttcaatcaattctccgcctcagcttcttgagtaactggaattataggcgtgcaccaccatgcccggctaatttttgtattttcattagagacaaggtttcaccagttggccaggcaggtctcgaactcctgatctcgtgatccgcctgccttggcctcccaaagtgctgggattacaggcgtgagccaccatgtctggcctcatcttcccttgttcatccacatttttccatatatataatcagaaaaattgtaccactagctttcagtcttttcctcaggcatcacgtgatttgtattttgccaaattcccattgagtttgggaccatcatttgtaatagctgccgtttttcattgaatagatgtgccataatttatatcataattcttttattattggctttgagttatttccagtagtttttctatataaaaaaatactatgatgatcatctttgtatgaagaagacaatttttccccctcattttgggtgatttccttaagccagatgcccacaggggaaattcctggctcagaggactccactgtgcttgtccatcctgcttcacaaacccatctctgtttctgcgggacttggtcctgtcgccctaaggactctgcaggcgccttcttgggagggctgcgtgtgttacatgcttgcttctggggtccctttaaatcctgcccccctggccaggcccacaggaagccagcccagtcttcctaaggaaccatccttttcccgaatttcccttcctattccatctcatcaatgctttgtagctgaaacaatgcatgttttggagctcacagtaagtttctggaacttcccattgcccatcacctgggctggccatgaactcttcatgagccctccattcacagccctcctgcccaccgagccccttactctcactcctagtgggggcctcagatggcctgcggtcctgcctcatggagaccactctggcctggcgcttcccacctcatgtgacttcctggattcctcctggaaaggctgggcacctaatgggagagatttgctgaggctcaaagcatgatagttccttaggggaagcacaccatgttggcagaggtactgggtcagatgtcttgccatcccattgactggaagacccagtcctgagaagcaaagccaagaccctggggccctggaggctcccacaccttcctgagcccaggactaagactccatgattttcctaataaaccagatcactccccagggccagggagcttctaaaggggcctcctggccttcccacctgggctgggctttgctggtagaatccaaacctccaatgcctgctgaacgtgaaggcaaactctcggctccactcagctcagtgtggcagaaacgaaatgcctccttttcccctagccctttatcccttcctttcttactttcctgtatcccccacattgactaccctttctcctcgggcacttaacaccagtccagcgacatctcctacctcccgtttgctcctgggtctttcttgaatttttaattcacccacaatcaataattttattcttttaaagaaattacagaatatttctaagtgtatgcagggagaggggaaaagcacagtgtgtgtcagtttagacttgatgtattctggatttagaagtgctgaataattcattcctgtttaaaaaataaacatactatctctatcagaacttgactggggttgcttcatgatgaatcagatccagggctgcagggttcttgggttgggcagcatgggaaagaaggcaggtgctgtctagaggaagccatcctccttctcatggttgggatgtccagatggtctgggccatgattagaggtggcattgctggttcttggagatttcaccttccctttgagagtttctatccctctgctagtgctcagttttgcaacctatccatcctaccattattctactcacttctttctctatttgtcctgctcctctgctcaaccactcctgtcttcccctcagtcaacctgaccatccctctttcccattttctctccctccatccatctgtccatcccttttcacctttatttactcatccactcaatcaactacccccttattcacctgtactcacccatcatcccatccatccatccacccacccatcctccatccatctatccatgtatctacttattcatcatcatccatcatctattcatccatctatcatccatcatcatccatctgtccatccatctacccatgcatcatccatccatccatccacccatccattcatcatcatccattatctattcatccaatctatcatatatccatcatcatctgtctagccatccatccacccatccatccatcccatccatcatccatcaatcatccatcatcaatttttttatccttccacacatccatctatctatccatccattgtgttttgggaatctgcatggtgcaaagttccacactccagagtgtcttccctggtattctttcttttttatttcaggtaggatctcgctctgttgcccaggctggagtgcactggcactatcatggctctctgcagtcttgacctcccaggctcagacagtcctcccacttcagcttccccagtagctgagaccacaggcacatgccgccatgcctggttagttttaattttttaaaatttttttgtagagacggggtctcactacattaatcaggctggtcttgaactcctgggctcaagtaatcctcttaccttggtctcccaaagtgttgggattacaggcatgagccactccgtctgactttccttgtgttctaatgagagattcagacaaggagatcaccaacaatgatacaaggtggccatttttaatttacttcactatgccctcatccctaccccatgaagtcagagccgatctcccctgatatttatatacatcatgtctccttaaaagcccctctcttcttccagtccttcctgaagactgctgagctggctctccctagggcactagtggcgaacaacagtcctgtgtgacaccttctaaaccgtttgttgtacctagggaaaggaggcccagggaagaaagcaccctcacccaaagtcatacaatgggtgtgagtgctcttgttctagaaccatccacgtttgctccttggcctggggagccttgcagagacacctgttctggagtcaggttcatgtcttcctcatgcccagggaggaatgatagccaggctggaaagggctttgtggaggggttggtgtcaagtgcacagacgcccgtctaggtcctccgcactttgccttctgggggctccagcaccaggctgcaactgagggacagaagatggctctagttagaggcgatttgcctgtgactctcacccccacccttggggccagttctccccctcagcctggaagcctcagtggcatgtcggatctgggaggcaaggcagccggtgtggtggctgcaacccagggctgcaagtcagcaggccatcatcaagctgctcccttttggtggtgggcttctctgagcccagtttcttcacatgtaaatggaaaatggggtgctcacatgtgttttgtcagtgtctgggggctgttttggggctccagtgacagcctgtgcatggagagctgtgaaaggctgagggcagcggagagggcccttccctgaggctcaagtctggttcctcagactctgaagtttcttgcatctgtccttttgccacagagcacttaggggtggctgaggggagcacagaaccttagatatgccaagtctggcattgcgcatggtgtccaatctgtggaccatgaccccagtgaaagtgtggccctgacaccaaatcctggcacaaaatcaacccagatgtcactgctgagtacctccagatgtgcccactgttggagcaagctgcaccttggtcacaggcactgggctgcccggctgtgccacctatcctccatgtggctgtgggggtgtcgcctctcctctaactgtgacgggaggggctgcctctctactgtggagcccctcccacacccgcagatgtgcatcacataccttgtctcctctctgctaaatcacaaacagaaattgaacttggggtcatgcatgaagtcatgagtgtaagtttattttctacatgtggagtgttctttatttacagtcaaaatcccctgaagattaaactttaaaaagatttaatagtgctggggtcagatggtaacccttgctgtgctccaggcaagcaggcagaactcagaaatagcaaccactttgaagaggcttggcaaagagggccgtccccattgccagggacatgtcccagtggtcagcccgggcttggcgtcgctctgccaatgctgttgggggaggcctgggatccttgggagtctgccccacggggcgaagaggggaacagtgggctcagaaagtctggcatccagagcagtgcagggagaaaagggtgcgggagacagggtgctaatttggggctgagtgtcctgtcgaagccagagctctttaaacagcaatgtcctctttttgttcgtggtagggaacaagtgtcctccaggcagccggacaagtcactttggctttttctagagaatcctcttaaagttggtcactgacaactttctgaggagagggccaggggatggtgactgcccccgacgcataggtgggtgtggaggaaatgaaaacgtatgtgaagcgcccagcacagtgtgaagctttcagtgtgtgagacggctttcgatgcgggaggcacgaatgtgcctccccatctctggcacaaagaagagaaggatttgctgtacaaatggccctggaaagacacgcgatgatttttttttaactgggagattttttttataaaaagctttttttttttttttttttttttttttgttttctagttgggcgcagtagcccatgcctgtaatcccagtgttttgggaggctgaggcgggaggatcacttgagcccaggagtttgagaccagtctgggcaacatagggagacaccatctctacaaaaaattaaaaagtaaccaggtataatggcacacacctatagtcccagctactcaggcgcggtcttattgatttgggtgttgttgcttcagcccagcaataactggaggctgcagtgagccttgattgcaccactgcactccagtctgggcaacagagaaaaaccctgcctctaaaaataaataagttaattcattaataaaaataaaaagccttttttcccccttatgcaatttaatctcctgtttgcttacagccttttgttaaaggacacagcattgttgaaattaatccaggaggagtgcatatttcctcgggcttggggttcagacctcgggctcagggccccagaatttacaccagctttgaatgactgaggtctgactgaaccctgccccatccagagaggtccatcccatcccggacttcctctgagaatccaggctcttctctgtgaacagttattttatgaggaaagtggggtgttttctaggcctgtgtttgattttcacttataattatctccacataagacttcaattttggattttgaattggagacacatgaacccagctttgcatgttgaaagatcagtgacaaaagtcacatgacatttgcatgccgtaattgttcctgcgaacccttcagcaggctttgtttggaagttctggaaacctgcatgaagcagccatgcacccttcatttgggaggtgtctttcatgcatttagcttgggtttgggtttctgtgttcacatctcagtccttccaagtgaaggaagctctttttcagttcttctcagatcacactcttggatctcctaagaccctggtgttcatccctctcacctctgcggcctgagctgtggaattgttatcctttgggcaatgtctttgtcctctgatgagtggagttaggaacgatgatgacttttaaggttggagaacggggttatattacccagtcagtagaatgagcaggcgggatcagcctgggctcctggagccaccattactagtggggacaggtcagactctgtgcccgtttcctcttctctcagatagggtggaacctgctttgtaaggtgggtgtggatgaaatgaaataattcacatcaaatgcttggcagagggcagaaaccctcgattcacaactctgatgatgatcatgactctcatattggtttatcaatgaacatgtgaacatgaaggtgccttgtgtgtgttcagctctgcagaactccccaggggaggtggggaggcattgcccagctccagtgaccatgatggctgaagaagtgagcagagaaagacttgggcctccaggagctccttgagaaataaaccgagacttcggtggaggccacacttggccacagctacccaagggcaactttgattctcattcgagctcatgtccctatcacagcaaaagctctgcagcccctgacaaggcagaagaggaactcatgggcctctgtgtaacctgctcttggggctctctgctgcccttgatcttcactcagaactccatggttctccatcatggccagaggggaagacttggctcttaataattgcgtattcaataaatggtgatgcattgttctggctgtccacgtagccctaactaatcactcaagttccattggaatcattttgtaatgcaaatagttatttgtaccacttgtgtgtttcagaaatgaaggtctgatgtgatgattccaccctataggagggagagatttgctggacccaatatccacatggctctctctggaaagatcgtggcatgttcatagatgtgaattggggttccttttggattttcctgctgatcttgaagctggcgttgccaggggcttggtgtacttggacctagtttggtggcttttagacattagagaccatcaagaggtacttagaaatattggctgctttcattttgttctcgatttctctctctcacttttctactcctccctttccccctgcaacaatagaattttgcggcatcatcagagtgagagatgggaattagcactgtagagagggataccctcatgcaagggagctctgttgggttttgttcaaacggatcttctttgaggggttgctttgcaaatgtcggtgtgtcaagaaggccaacagctatctaagagaggcctcttagccctcaagagtccctctcgggctctcagtagacaaacacctgtcctaagccacctctgagaacatgggccacacaacagcaagtgaacagaacagagcctttattgagacaggtccgaaaggactggagcaatcagcttacagggaacatttttgcttcgtaggaatgcggtcctgcttgctgaaaacatatcctttgtacagagaacacacataatcctaggtcaactttgccctttgaagaaaaatatgctcagctggaattttggaggtggggggctggggaatgggaggtggggaggaatctattctacagaatatctgttctacagaatatctgcttagagctagaaccttcaaaggagttaagtttttggagttctgttctataaagtgtgtgggatcaaccaatacaatgcaacagccatgaaagtgatgatgaaattttatttaagagaacatctaaattatgtttaaagttcttgttggaactatcttttgcaaagatagttccagaccttggaaagcccaggcgtgatacagacaaaagtttatcaggcccctctccctctctgcacccagctgtactatttggtggtgctatgtgttcttaaggtcatgtcaatatttccattaaaacacacatttttaaaatggagatttattactctgacaggatagtttgctctggggcataagttaacttactgggtctacacttggtggggggatactttctctaccaaatttctgaggaaaaatcagaattgatttgggaattattgtactgtgctacttgattttcaaaaaatatccattgagcagaatggactaaaatattgcaaagtaatatggtttaggtgataatttataatcttatgatttaaatgagatgctgtatttgaaagcacttattttcatgcctggtatacagtaggcattcaataaatactactttggtcctatgattactactatgattactcccgtcaccaccaccaccactactaatttctttgagttgggttaatatggagtaatagatcacatactttattcatcagaaagctgggaggcgccaggtgcccacatgttaaatattaactgtgctaaattcgatcatgtagaagtttgtggccaatagtattatattaaaataaatttggtactgtaagcaacttggacaaaagttgtggaaccgaggcagaaactcactcttgagtggtcagtttcttgcacactgggttatgtgtcactggcattttagggcattttcactttacatctgcctttgtttggtgagaaactttgcagttttctgggctgcagggggcattggagggactgagaggacactcgactttggagctggggatggggaggcctcgttacaagccttgctttgctaccagtggatttagaaaaggttacattgccactctgggcctcaggctcccatttctaggaggtaaagtagtctatggctgtcttactctgacgtttgggctctcccaggccatatctgtgaagcaacagctggtggtctggcttcactgaccctcctgctctcaagacatggccattgtagacatgtactcattcgggatcagaaaggaatggaagcaggtggccagggaacttcgaggcattgaagtggagtccatttttcggtcctgagggctcctagcctgagaaagcttgacctgtgggtcagtgaagcccttgcttgagccagcagagagttaggacctctgattctcaaaacataacttcactgctccgctcacacaattgcagtcaaggaattgaggactagaggtttcagtccctactgcacttccagcaatggactgggaaaatcaggctcaagtcattgatactggtaaataaaagggccttatttcacctgtaatcccagcaatttgggaggtcaaggcaggaggatcgcttgaggccaggagttcaaggtcagtctgggcaacatagcaaaacctcatctctacaaaaaatttaaaaaatttagccaggcatggtggcatacacctggggtctcagctgcttgggaggctgaggcaggaggattgcttgagcccaggagtttgagactgcagtgagctatgatcacaccactgcactccacactccagcctggggaacagagtaagaccctgtatcttaaaaaaaaaaaaaaaaaaaaaaaaaaaaagaatattatttgtctttatgacagatgaccatttcttactagataattactgaatactataaatcttagatctcttctgtctctgcagtggtcatgctgattccccatcagatttgtttgccaagtgacttgaggagatctcttgtaaggaggtcaccaatgtccttgattctggtgtcaccgtctcctgaggtgtgtgttcactccgagtttctgcaggtctgttggccagtgacattgaccaagaatgtcaaggtcatgcatccaacaggctggactttgcttccttgaccttctcagctcagtaacttttcttccacttgaccttagccatccatttcagatccacacccaggcttgacagtgaccaacacctgagctcctctgaaatctggtcttcacccatcctatgatgagtccatcactgcctttccctccaaatcactgtttgtgatgcctccactgtcaatcattggtgtgctcacccagggacccttcagcttcctccctgtcccctgcaggggaccttgtcttcccgctgcccttcacccagtggggagatcatggtccatcattttcatcacttccttgcacccattatcagctcttagctctgtggcatgttttctttttgtctcatgcacctgatgaatcttcagtcccgggtgaactcagatatctcccttttccatgccagttccttgcaccccagctctccaggagaaaaccatgcagctgagctgataggtgtcactcagaatccatggccacgggcatcaaatgggccctcagcatgccatgtgccaactgcatctctcctgggcttgcttttcaaattggccacactggcttttctcctctttgccccccggcctcagctactgatctcatctccattaaaatgcagaagtcttgtaggatcttcctcactctccctccaccaatctgccacttttctggcccttgtcttctcttctctgacctgctcttcccagagatcctcacctctggggccccagtggccccagcctttgtctccttcttggagaggtggttccctgggagcatgcacctggcacccttatgtatgcacccaggcaccctcagtgggcgtccaggcatcctctctgcccatgcgtgtcctcctgctcctccgtcagaactgcccttccctccatcctttgcagctggcttgttctcctctgccaggccctgtctcaaatatcccctcctcagaaagccgttgttccacctccctatataaaatcagacttccccagttgctggctggatctcaccctgcttactcacttcatcataacctgtaattatccaaattatttaactacttcttgtctttcccttcccttgaacttaaagcctatgtgggaaagggccaaacctaccttgctccttgctgtgacctagcacccagtacgatgcctgattcataaaaagcactttataaatttctgctgccctggtgtggtgcctcatgcctgtaatcccagcactttggaaggccaagatgggaggattacttgagcccaggagctctagaccagcttgggcaatatggtgaaacccatgtctctacaaaaaatacaaaaattagtcaggcatggtggcatgcacctgtggtcccagctactcgggaggctgaggcgggaggatagcttgagcccagggggtcgaggctgtagtgagcttcctgcatgccttcctggtagaaatcctagggcagcgtcccattttcgaccttctgccattgcccatggcagatcacgtcactgcactccagcctgcatgatggagtgagaccctgtcttcaacaaataaattaataagtaagtaagtaaataaataaataaataaggaaataatatttgctgaaagagagcacagttccatgaccatgaggccctggtagagggacctcttctgtggccacagtcccagcttcatctctgaaggactgtggatcccagacacagagacgtccgggagttgcaagggagcaccacctgattctgtcctctctgtccctcttgagaagtgtcgcccatgcttctgccatgaggcgagctgggtggagaatgaatgcccacactgaacattcaggtgggttgtggtttctgagagctacgtggccatgaggccgctggtcaagagattcctcctcttcatcttcaccttcctgcctgcggctgtctttgtctggggcttcctgcaggccttcctggtagaaatctgcttgctgctgctggcctgcctgaggcccagggcagtgtcccagtgtctaccttctgccattgcccatcagtagcttccacctggcctgacctcactcacaccttgagccctacctgcaaaaagtgaccttggactgtgacctaggaacacccgtgcaccagccggaccccacggagactaaccaaagacaaaccaccccacaaattagtgggctgtgcctgtgttgacacatctattctcgccctaatgatatgtttatttaactgatgactgctgtcctcattaggggctcattgttgagcccggaatagtgattatttttgctgatattccttttctgcaaagatgatttttttaaaaaatcactcttttggtgtgctatgaatccttaatgaggatagttaaatttaaaagaaacccccaaaccacccttcaggttgaaaatagaagtgtctgcaaaagcaagctgctaatttgctgattattgattgacatgattggtgacagacccaaaactttcaataaaatgaaagctcccatcactggagcatggtagcaaaaagaaacagaagcagtttcgccaatgggaaatgagtgcttggggttctagaacattctctttcctgcatgtagaaagagtcatgattctggaagtttgaatgttggtaatggcctccaaattggacccaaagctatgcgattcttggggatggatggagaaagatgtttgtaaaagcttattagctgaatactcagagtcaattaatgaacttaccaacccctgaaactcatctttctcctttagaattctaatcgaattcctgtgtggcaggtgagtattaacctcctgcttctcagacaaggagagtaagaccccaagaaacagaatcttggctaagattggggctagggttggtattaggacgtctggttaagacaaacgttttctccacccatcgctgggagcccacattttccctccatgacacaatttgaagactggttctacaaatactggcccgttcccctttacttgaatatatccaaatacataaggactgtgatcatgctgtgaggagtatgacacggtgggttgatcatggagatgttattcatgatgaaaattctatggcctcagctcaatgcccagcctttacagcagtttccaaccattttggcaccggggatctgtttcatggaaaacaattttttcatggatggagtggatggatggtttcaggatgaaactgttccacctcagatcgtcaagcattagattctcataaggagcacacaacctagatcccttgcatgcgcagttcacaagggggtctgggctcctgtgagaatctaatggccctgctgatctggcaggagatggggctcaggcgggaatgctcgctcactctctgctcacctcctgctctgcggcccagttcctaacaagacacggactgtcagtggactgagggttgggggcccctgctttaaagatctccgtacagcatctggggctggcggaacagggatggggacacagaggagtcacgcaggaggcagacgtggccagagcatggaggatttggcaccagccaggaaggaacaagcctgagagcctggctgtgtatcgctcccaccctgccacctatgaacagtgtgaccttgggagagccatttaacctctcggaaccttagtttcctcacctctgtaatagggctgttggggcatcaaataaaataaccgtgcatatgagaggctcggttacatctttaatctcgatgatggaagctgctgccactgccaccacagccacccccagcctggtacacatcccatcctgtctcacgagcatgtcatctccttttcccacgtggtctgtgtgttttgggaggcctggcacgcccacccctcttcccagcagagcccagcattgcaccagacacgtgttcagcaggtgctgagctacgcggtgggtgtctggtctcctgaactgacccagtcccggcccctttcccagtgcctggcacatctcctccctggcacatcttagctcctgctctctagggctgtcccttctcttctcagccaacccgggtggagaagctgcgagtgccacttcctccatagctccctgatctgcccttgtgcacggatagaatcttcctcgccagggctgccctcagatcctagccttgaaactatttctacttgttcatgagccacctggactgggtccccttcagctgctgcaactcacagctcaatactgggctgtccaggagccaccaagaaccagcaggtggatgggaggtggtcaaggagtggccctggctcagatgaccatccccactgaatggattcctcctaaatgaatagtaacctcccattcctcagatgtgagaccccaagaagcagcatcttggcaaagactggggtgagggtgtgatatcaggacctcaggttaaattcggttcagttctagagggagagctacaggtaaacaagggaggaggtgaccccgcccaggctggtcagtgcctactgagcgcagactgtatgtcctatgctggtttaggttccagcatgagagtaaggcagaacctgcttgatcacgggggacttgagtccagctggaaagatctattacatatttactggtgtcttcatcattggttccttctagaagttgccctccaggaaggcagaaaccatgtctgatggctcacttttgtttctccagcgcctggcacatagtaggtgctcagtgaacatgtgccgaatgagcggatgaatgaacaggacacctccacgtggaatgcaaatgctgttggacaggacaaggggaaggacagcgcagggcagcacaccatgccttgccagagggattgcataaacaattgctatagaagcttacaggctggcggaggtcccttcaggcttgggctgttgaaggcttattaggagagagtgtgctcaaactgatctttgaatcctggctggcacttggaggcagagaggacagagaaaagcatgcctggaaggtaggtgagatgggccaaggtgtgcaggtaggaccagagagggaaggtgtgtctgggggcaggagggagggtacatgcctggaaagcattggagaacatctcggagaggtcagtacaggccagaatgcataggcccaggctgcagagttcagctgtgacccctgatgttattttaaggtggtggttttttcatattcaattatgaatgaaattgcatttgaggatggcagctgatgatggcgtgtggttatgctgtgtgggctgctttcaaaatagctcaccccaaacttcattagtgattagttcgaggaaagtgcagcctgacccactggcaatttttgtatcatctgggttgggtctcagccgtgagaactcaggaaaaggcagctggtggctttgcaggtctcctgcaacatgggctatctcttgcaggtcttgttcttgggaggcctgttccttcttggtggtggtcagattgttactcctttctgattctcctttaccccggagttagtcactttcctactactcaaacttggatcaccctcaagggagactgatggaaacccctgctgaggctctcagggctaggaaagccaaggctggcactggacgctcccagcccggctgcctggcccacagagtggggttgctgagcagatggctggcgtccgcaatctcccaacttctgctaaatatggtcagtgtttgtagtagctcccaccaccgtctgtgtccgcatgaactgtagattttagcttggccacccctttagtcaggcctttcctggccaccttccctttgccgaacttaggataaaccctcattataatcgagattagccttagtgagaagaacacatgggttggcaacaatgacaaagcccaagcagcctccctgtactttcctgggcaccacaaaccagtgccagtcccgtttcctctatggaaagcccactcctgatactagctgatgagacagctcacagcccatggtgggtccctagatgaggccttccttatctccctcacaggggccagagacatggctattaaatggggatgcttggggttgcttaaggctctgctggtactaactgaccttcagtaaattgcataacctttctgagcctcagtttcctagtgtctgtatagtgaggataaagcgaatagcagaaatgaaatgtaataacgcatggaagttgaagaacttaacacggctctgggctcctagcaagagctcagtaagtgttaactgtactcctcaataagtgatgatggtggtgatgatgatgatgatgacaatggtgatgataatgttgatatgatgataatggtgatcgtgatggtgatgattgtgattatgatgatgatgatgatggtgattgtgatgatgatgatggtggtggattatgatgacagtggtgatgatggtggtgatgatggtgatgataatgatgatatgatgataatggtgatcgtgatggtgattgtgattatgatgatgatgatggtgatgatggtgatgattgtgatgattgtgatgatgatgatagtggtgatgatggtgatggtggtgatgatgttgatggtggtggtgattataacaatgttaatggtgattatgacaatgatgatgataaagatgattgatgatgatggtgatgacaatgataatatgatgatgacaatgataatatgatgatgatgatgacaatgttgatagtaatgatggtggtgatggcgatgatggtgataataatggtggtgatgatggtggtgatgatgacagtaatgatgatgaagatgatttgatgatgatggcgatgacaatgatgatatggtgatgatgatgacaatgatgatagtgatgatgatgatgatgatgatgatgatgatggtgctgctactgctgatgatggtgatagaccttgtggtatagtggctaaaagaatggagccaggtagtctgggactggatcctagtgctatcacttcctggttacttaacctgggagaaactacttgacctccttttgccccagttccctcatatctgcaggggggcaatgctaatagcatttcacagggttgttgtaaggatttgaacttggaccccaccaaggaggggctggcatatggtaagcatgattaacatgctaactagtgagtattagttcttattggttattatatgattgttgtcttattattttagtagctgtgcaatcttgggcatgctagttaacctctttgagcatcagtttccctatggatgaagtggggacacagtgcctgctgcagaaggccattctgttgctggtggcatgtgtgagagtgcagcacctgccagcccaggttgcctgctcttccctccatgtcagcttggtccctcctcttccttccctcccccgggctgtaaagttccgtagctaagtaaccctggctgatgtgtggcttttggcggtggtgcttacgggagagctgcatgtgccgccgcctcctttgggtgacagctgttcctaggcagatgcctcccccatgttctggagcagtgaaaaaaggggagagcgtcccagatttaaatttggaatccgcacggaattgtgccagcctgcctcggagtccacagggcccatgggccaggtgctctttggggtgactgctctctggacactggcatattggtcacatggctgggtctaagttgggtccttgaagccctgagcacagtgggagtcccagaacagcttctagggctgtggagcagccactgaccccacccgaggagcctctcactcatctgctgggtgaggtgcaggtgggaatactgctgggaaaggtgtgcaggcagcaggagtgagcaagtgagcaagagtgggaccattgatgcccttggtctcagggtgtggcacacacagggcttgcctaccctcgggcagagctctgcccactgctgtgccagccttccagggatctaggatggtccctgggctgggatgggtttcccagatggacacctccacctcgagggtgagggttgccctctgggggctggaggttggtgacattgccaaatctctgcaccatagggagacaagaggggctgctacagccctggagtgtggaggaaaggttggagagggaggtggggaggccagcagccacgttctgagcaggcaggtgctgtggctgcgtggttgctgtcgacttggaggctgccttcttctggaagcagggtgggctcctctggaatctccagccctaaatgttctccttctgccccagatatctgtgtttgcctctggcctgggggtatcctgcaagggtgagctgggtggaccctcctcaaggaggaccagtgggcactcttcatcctagggaaggcaggtggactccccatgaatcctgtcctgggcccgggcaggccgccatcccctgcaccccctcttcccgcccgtcccagctccaggagtgtctgctgtctaagggacagtggtggggacagggtaacaggtcaaacctggtctcgtgggctgacttgcagagtctccctagctctgaggtgtcagagatggccttaaccccaatggccatgtctctgggggaacaccggccaggtagcctgcacaagaagcccaaatccaatggtcacactggctgtcattcctcagaggtggtttcaggggacaagatgatgggtgtcagcaggacccttaggaaatgtcagtcagtcgggtcccggaggggagaccgcactgggcccagcccagcccctggactccccctacagtgctccctgctttgggtgtcaatatcccctaagaacagggcttggactcgatgcataatccattttaatctctccccttcttacttgactttttatatatatctcagaggcaaacattcctagtgaagggttgttttcttcttgcaccttggaggggtcttttcatctgctcaggcaccttcgcatccccgtggatcagggctcagagcagaggagagtcagcagtctctaaattatcatcatctcctacctgcacatgtacacaaaaataagcctgaatgctttttcttagtatgcaatttgctgtctatttttaacttgtacacagagggccaaaaagaaaattccatgaggacatgagagtgcattgaggttgcaggtatacagtcaccaaagaacctgaaataattgccggaatgatatcctctaaaagatgtgagcctctcagagagagagagagagggttcctcttgcaacaggcatcgtgtgtgtgttttatgtcccttctcttctgctgctgtgcacttaattcggttccagccgtgtcagggagactcgagaaaaaaatcccaccattaaagacatgctctttgttttttcaatctgtgaccccagcaatctctttagcaagccatggttcagtgaactggcacacagcagccgttcggcagtggaaaaaatcataaaacagatggaagctttacatttttgtttagtttttaagagcagtttttataacatcgcttaagaccattctgatgcatcatactgtttacactcaaagctttgtagctaagatgtttacagtatggagaatgttttaagatattttatagttttgatatttagataattggcaaggaaaaaaatagtttgttgagattgcagtgatgttgggaaccgtgaagtaacttatgagtctcaataaatatgtccagttcggtggaaagtacaaactcagttaaaacaaaacaacacaagagggaatatctttttagtgaaatcatttccttttcttaatcaaaagatgacaggcagggccttagaacttccatctgtgccacaccacaccacactctgtgcctgctgcttctcctctcgtgattgatagctgcaccccattggtcccttgctattctgcatgagttcatgcagacaccaaagttaataaagttcagttttaggagaccaccttgaaataaacccagggcagcccccctcatctctttgtgcagtagaacttgcagagatttttttttcaatgtcaaagaatttatgcagagctgggatttggaactctttttttttttaactgccccaaaatggcattaatcaaaaacaataactccttttaacttttctaagtgctctaaaggaaagtatgaaataatctgtgtgtgggccacaaatgtggagaatgcaaacatttcacaataaacatgttgaaatgaaagtccctggcaagatagtctgaaagatagtacatgctgggttaattaatgcatactcataaaaataaacctcacttttaagatttgaccaataaaaatcattagcatatttggatcagatgactttatgtatacattgaacttctccatgcaaattgtccttggaaaagcctggaaacagatttcagtttaaagtcaaaactcctcttctgtcttctctttgtgtttccagtacagtgatatgatgatttattctggtttcatctgttatacctgcaattgatctactggtgatgggattaaatttatcattttagatgtataagtcatagttagatagccagaaaaatgtttagttgcataaaaattcccattgtttgctttcgacacacagtgtttgatttttgccgtagtcaaattgctgtagtgcattatttttactccaagatgtttatttatttatatatttatttattttgctatcttaaatggaatcattttggcccattcacaactgctatctttaaaaagatattttcttgagatcatgtattcaaacaaatgtggacttggggttgtggactctgctatgtgctgaggttctgctgaattagacatcacataattttctaagtctaattacagtatggaagattccagttttatgttacgctttttgtacaggaaaagacaaactgctacaaagacctcttcagtatgaagctaacagtaaaaccaaactcattttaaaagaactgaaattgaaattcataaactcagtggaagttaagttgtaactacccagcctgggaaattctgaacctaagataatgctgcattttgaatccttatgaaaataaaaacaacccaacaacaattattgaggaaaaaaactctagcatgagtttaattttatccaactttattggcagcttattttgaactaatgtgcaataaagttgccaagcacagcaattgaaagaagtaagaaaaaaacatttttggttgttttcttacactggtttgttctaataaaggcggtagagaggtcaacacctgaacagataatttgggtgtctgtctcaatcatgcctggcttagtgctttaggtcttatcagtgctgtcattagccacttccactaaaggccaggtgatggtctggctgctgcagggtgttccagggtctgcagtctctgggtctcttgtctcccccaccctcggcccggtggggacagccttgggcccctggataagcccttctatggtagcatcctccaagcttgcctgggaacaggacaagtaccccttcctaagaaagaggctttcacatgaatgtttctggaaaaagggcttgcaagtttgagggttccagcagattataaacagtgtcggcttcataccctcattttgtgccagagactcaacattgcctattttagagactgtgtgtttacgcctccaaaacaaacctctgcatgtgtgtatatttgtccaaaagccacacctagtgattcctggggtgggggagcatctcttcataatatgtatcacaagtgctacttactgatgttagcaagcttctcagctccctgctccatctccagttgaggggccttgacctgggtgaggctccgacttaagggaaacctagaaaaatcctgtgcccaggtggagatgaaggggaggaagaggtgttccagggctactaactggtagtccctggagaaccctatgacatccacgcagtgaaattaaaagctgaagatgtatatagcatgtgcgtgattttcatcatacagaagtcccatagtttccacctgatttttgagggcgttcctttcttgtctgtagctgagaaacagataaacttttgcaagtggacctttcgatgcgaaacactaggagatggtaacctatgcctggataaactgggtgctgcttcaggacaaagatacacatttctgcccctgaagaagtctcacccacagaatgctgggttggatggagggaaaacagcaagaggttggccaactctgagtgcatcctgaaagcgtccctgtttcagtccttaaaaaaaaacttatttcagtcctttttaaggtaatagcttggtgtaacagtcaagatggccatgcgaaagtgtcagagggagcaagccatggcctgtggtgagacccagggaaggtagttgaaggggcccctgtcagaaccccaccatggggtgctgggtttcaggggcacccctgttttggccctgtggtttcccacccctagggcctgcccccagttggcagacaaggacagccagtggcccacacctataatcccagcaactttgggagggtgaggcaggtggatcacctgaggtcaggagttcgcgaccagcctggccaacatggtgaaaccctgtctctactaaaaatacacacacacacacaaatatattggcggcctcctataatcccagctactcgggaggctgagacaggaaaatcacttgaacccgggaggcggaggttgtagagagcagagatcacaccattgcattccagcctgggcaacaagagtgaaactccatctcaaaaaaaaaaaaaaaaaaaaagacaaggatgctgtcacccatatctcagactccatacttgggacatgatgcatccgtcaccttcattcccttctccgagtcagcactggatcttgtgccttgggaattatcagctcttgggtctcccctgtccaacgctgggcctggcctgccacaccttaaaagccctcactgagcgagtccctcgcttgggctggagcagagcaggcaggccatttttttttaaaggctgggcccatggtggcctcggggattcaggttccccatgggcagaaggctctttggagacccctgcattcatcccctcatttcacagttgggaaagtcaaggctagggaagagaagggactcccaaggtcagacagcgagacagtgacttagtgaccagacccaggctcctagttcttggccctgtgatcttgtcactacgtgatactgcttgtctagtgaatggcacatgagtcagccttctgtgggagacacagattggatgctactttctgtaagatttctgcctcctgctggcttatcttttaatatagcatcaacaacagcaacagcaacacaatagcagctactaactcggtaccaggcatattatttttctaaattaattaatactaattcatgatctcctttagtttaattcgttcttgcaacaaccttacgtggtaggtactaccatcatccctattttgcagatgaggaaactggggccggagaggttgtcagatgccccaggtccacagtcagtagtgggggaggaccacgccccgggggctccccccagcatgagtgcactcagctcctttctctgttcctgtccccagccctgtgagaagactccaggtttgacagagctgagcattttcctctttgaaccagctatgtctctgttttatgtacatagatgggcaagaagtactggcttttatttatggcactgggatataaaatttccactggacacacattgatttaaggaaatctgtggtcagtttcaagaagtgtcttcaccagtttatggtaaaggtataagcagatgtggtaatagcatgaaggtggcaggcaacgtggttggaatttggtcagcactgtcccatgtctacttaaggtagaagaaaagaaaaaaatgtagtgactccacttttagaaatttcaaatgagtccttatctgccttctgggagagagaagccccagtgacatcttatgaccaggtcattgaaggcagagagtctcggatgcttagttttcctacatgcatctaagggagccatgctcgacccaccagcgggagccacagatccatgaagtctgcagtcttcatccagtgtcatcccggggactaggtcggcctacctgaaaggggactggcctctggcttggaatcagtggcagagctggaggcagaaggaaggaggaggtggcaaattgggaccgggaggcatcagtcgggagggctggagagtgtctcattcaaactcccgtgtacagcacttgtgctttgttgcctagtgtgaccaggttgatgactgtagctggcatgcaccccagatgactaccagacattcaggataagtcttccatgccactatgatgctgccacagtgttacagattcactgccatcggaaaggctgtaggacagtggttctcaaactggcttccaagggaccccaagggtttccaaggagacaccttgggagccaggagaagggaagggctcagggttcttctccgcagctatgggcaaagcaactgtgctattatcagctcatatgggagaagatttcctcgggaaaaggattctgctactaggaaacgctgacaaatcatatatttagaccaaattttattctttttctaaaattttatttatttataacttttgttttaagttcaggggtacctgtgcaggtttgttacataggtaaacttgtgttctggaagtttgttgtatagattagttgtcacccaggtatttaggttactacccattagatgtttttcctgatcctctccctcctcccaccctccaccctctgagaggccccagtgtgttttgttcccctctctgtgtccatgtgttctcatcatttagttcccacttataagtgagtgagaacatgcagtatttggttttctattcctgtgtgagtttgctaaggataatggcttccagctccatccttattccttcaaaggacatgatcttgttcttttttatggctgcatagtattccatggtgtgtatgtaccacattttctttatccagtgtaccattgatgagcatttaggttgattccatgagtttgctattgtaaataatgctgcaatgaacatacgcatacatgtctctctttataacagaacaatttatgttcctttgggtatatacccagtaatgggattgctaggtcaaatggtatttctgtttttaggtctttgaggaatcaacacagtcttccacaatggtggaagtagtttacacttccaccagcagtgtgtaagcattcctttttctccacaacctagccagcatctgttattttttgacgttttaatagccattctgattggtgtgagatggtatttcactgtggttttgatttgcatttctctaatgatcagcgatgttgaagggctttttttttttttatatgattcttggccgcatgtatgccttcttttgaaaagttagaccaaattcttgattctgcagatgggaaaccaaattcctcagaagatcaaaggattacaaagatcaactctgtacagtcatttaaaatagagaatgtctttattcaagcatatcggtggagctttggtagaagaaataaaacatactctgaaaggtgacacgagggttcctctggtctagccgcctgctttttgggcagcctggcagctagaacatttgatagaggtggatatctgcctgggaccaagctttccgccacagggggcccagagcctgcaagacagaactgctcatcgtatccacccatgatggctggaagttgagtatttatggggtgccagggccatgagccaagctctttcatttatgatctccattctacagatgaagaaatggaggctcggggtcaggatgtgacttatcagcaggagcctactgggctctggtccagggtctgtgctctcagccactgcggcccctgctcccgggaagaatgtcttggtgtctagtaggattgcactgaggtatacagggccaggggtctcattgtcagaaacacccagaacgaatcctcccctcttgaagattcagacagaagaaataggaatattcctatctcccctttcctgacactgcaagggtttttgcaaaatgctcctagctgccccacagggtttctagaagtctgtgtgctttgaaacattggaggggagacaaagatgggtgaccaaacccctaaacagcaaacaggcaggggccctacttaggatgtcttctcctatgtcttacttcaacccgccacgtgggcatgctggagacgcccatgtgtgtacttgttgatgacaagattccaatgatgttctttcatccattcatgaagtatttttgatttacatgtgtttatgcatttacccattaattcatgcatttattactttttacattccttcaatcatctttctatttctccatccatccatttatacatgcccttatgcattcattcacctcttcatacatttgttcatgtatgcatttgttagttccttccttcattcaacaaataaaacacgaagaaatgaattaaagcttctggaggaatctgtaatggtttaactgcacccagggtagattctgggcatctttcatatgattggatgcagaggctcactaagttgaataaacagtgtcagggtacctaagaggcatttttttgtggcctgggagaggtgcaggctaaactcatccaccgtgactgtagaattcaaatgtcccttacgtgctgaggtccttgagcctccctctctactttttctccatggactgataatttgtgggcacccctgtgggtcccctcaacaagtcttcctgtgaccctgggacatccttgggttgctcctgagtcctgaggactggcagaatcctccatggggatgcaatggatggttgagtccaagatccagggctgggacatgaaagggcaaggagaggttatctgtcttgagtctcatgagggatgcacacagagcagggcaggagctgcagtggagggcatggaggcaatacaaaagtaccaagtgccatgcagaccaaggtttccttctcttctttcaccaaagagtttccatccattttctttttttttcttttctttttttttttttattttcacgtgatccctgagaggccagcagaatgaatgccagtgcacctgtttcacaggttgagaacccatatttgaaagcacaaatgattgtgtatgaatcaaacacaatccaaagataaggtagaattcctggcaatcgtaataatcttgagtgcaagccaggctaagaatgacacaaagggaagggccttctgcctccaccaaatgagtgaggatgaaacatactgtgtcttctgcctcaagtgctgagttggtgccctggagctaggttgattgttaagatggcttcagtccagacttcttttggtttagtgagatgatattttgttttcacactcaactttacttactgcatagggctccaaatgcatctatgtgccctttctgctttgcagacagtgttccaagtatctggctgcaaagattgggtaagtagagcattcataatggctttcacacatgcaggctggcctggggcacctgttggttccagatgtttatggccttgaccccggtgtgaatgtcatccctccctgcagtgaaggccgaatgagtggtcaggtggaaaatgttcctgccttccttatactggagttaacttccaaggtacagtccttccccatgcattcagaaagccccactccaagaagccaagctcaggtgtcctgtttcacctatgcctcggagtcccacccacattgaacctcaactcatggccaatgagaagcgttcttgctacacactggttccctaggtaaccgagtgtacactcgagaagaactatagagaaaggaagaagtggtaccccacaccctcctctccttggggtctgtgctttatccacctcagccctcgaccctgccctcaccaactagccatctttttgcctgttactctgcttgatttaagatacacagccataaacactcagggcagccagcagcatggccggatataatattaatttcttttctggtttatttgtgaaggagtcaaccatgtaaatcactttaagtcactaagacagaaagtgatatcgcatcttcaaatggagaagtatagtatgttaccattaaaatctaagtagaatatgtgattcaactgaggttgttaatgtgggtatacttttgttaaccttactttcgattgtgtgagatgctccgaaagttgttttttttttctattcattttagtgcaaaccaatggatacctatctgaggtatatcattagaaagtctggtgtctgccggacaatctccttgcaatgccatttttcatgacttgtttaattaacaaccatttttgacctagacttgttataaaagtgttgctattctctcctgctaaattatgtctaatgaacatatttgcatgttatcagatacagcaatatatcatttcaaatttcggcgtttaagcctgcatcactcaaaacagcttttgtggattagtaagcaggtgaaatcaaaaatctcatttcatatctgacattaataactttcagggggaatgagcattggcatttatgtctggaccagaatcgagtccaatgtcctagaaacacaagggcagcagacaaacctactcaccagataggaaaataaatcatgcataatgcagaatttctaccttacatgttaattaatgtgtgcaatcaattactgatgttacaatatgagaaagaaactggtggggaatggggtaataaaaaatacctatagatttatctgcttcttttttctatttaaacaaatagtcttcaagcctgtgaatgctgtgttgagacatgctctgaataataagcatcataaaatctaatcagatttataagaggaattgattgttgtggcaggaggagagggtggaaaataagctgaaatttaagtgttaatttttatgctaatccacagtggcttcatatgaagcaattttgttctgtgccacaaatataaaattgtcccttgcagagaaatgtcagcttgctagacctgaaagcagtaatttattaggtatgtttctattagtatgtgtcacagttgttagcaggctatacacacaatggtgcttcatacttatcctccaagtctcagaatgtttcagctcagtggctggaacgtggggcattaatacattatcatatgcggggtggtctgtgccctgtggacaaaaggctatttaatacaatttaatgtcattctgagaagaagtggaaaaataaagacggggaataaaatggcatctgtgtgtttcactgtgcactcatgcacaaaccctcagtttaagaggtatgacatttctgccaagaaaaagaataaaactggggcattttttttataacctgttccccactgcagtattttctaaatgctattaagtgatcgatttacacggccacatgatgatgtcatctataagaaggggaatgcagatgacagcaaaatactagtgacagtgaccttgtttcagaatccttggaaccctgtcagctttgcttccagtatatggtttcaaagaatgcactttttggacaatatctagttactgggtagtgaattaatagagttaagggttctgatgcaattcacatataggtcaattacatgcgccaacatctgctctgtcactatcatttgcatatagcattcatatgttaatgatgcctctttttactcaagtaatatatttaaaaaacaagatttgcatatcagtttggatcagtatattacaagcaatttatcattttctccttcttgttatgattttaagaacaatatcttgagtgatggctgctatatttgagcacggctctgatttatacaagaaacccctcagtgggaaagcttccattctaaagctgcttaaagccttataaatcaataatgacacagatggactggtgataatctatttagaatgcctgatagcaaatattgttgtacagatgattagagtggtaactgttttagcagaaagcctgtcctctcttggtaaatggtaagtttgaacaaaaaagtgctcgcacatggacttcatgttaggaaatcttcttgctgggtctggattgcaaaggggaaaacatgggggagaagaacaaagggacttcccgctcctgccaatataatcatatcaatccctgtttctttaacaaaacaggacctcttaatggaattgtgtcttcaggtgtaaatagcattaaaagctgcttctcctctcctctttgccctgatagagcacaaggagtgagaaaataaagtggaggttgtcagaagtggcagctgcttggaatcctgataaatataagcttttattgatctgatgaaaatgaaagatcccagtgctaggcagtatttagcttcttgtctacagcacgtcaccggtggccttgcatggggatagatttccattctcatacaccggatttgatttcatctttaaccttttccgttgaatttccttgacctctgcatattgctgtgatttggtgaatttgttacatttcactttacatcatttctttctatatttccttttgtgatagggaacggggacgccccctcttgcaatctgtcagtgcctgcaccaactttatcctttctggggcattttctcaccagactgacagtccttaagacaagtatgcagttaagctgctaaggtaagtcttacgatattagaactccttcttcttcccagacatacctcatttccttctgccttgttgcgttgaccaaacacaaatctaaaccaaatagctcctctgtctcctgcccccggccaggggcttccttgtaccctctccccaacccagataggagtcccgtacctgcccagtaagctctcggtgagtggtggctggcagggcctttccccatgggggaggtattcctttgtggtttgggtgtgtttggggatgggtggggaagaggcacaaagagatcgtgaaaaaatgttattttctcctctgtggcttaaggcctttctgaagttttcttctgagataaagatggggcttcattgcaaaatcctgaggtgctgctaacatattctggttccaagaaagtgctgctgttattttgagtagttttgatacaaccaaatcaaagtgaagatttgaaatagcttttctgaaagcccaagctgaagtcataaattattctgcaccatgattcattctgatagtaaaaccatacttctttgcctgacatcgctgaaatgtggaaaagtgaaagttaaaaataaaatgaaacatttaaatcttggctgttgagaacctcaggtagacatcaaggccagtcgataaaagcctctatcaattaggcttccacggttatcatcagatattggtttattagcaattgcacaggtgccgggttccggtattaagaatcggaagggataagaaaaattcagggaagtaccataaattgagaagcaagggtctggggctccgaggtgcacttgaaggcagagcacgagacagtggtggtgctacggcctcgtgtaatatcgtaggagaaaaatatctgcagcgtaagagtgggaagttttcctttttttaccccctttatttgagttagaaagtgttgatttcacactgtggtgagtgttttccgtcagtttcttggtgggtgtatttcgtgttaagaaaaaggaacagcgaacaccagcagtggtcgcttccatcagtggatgagcagcccccccctggcaccggtgacttctcagagcactgggtctcccctaggcatggtgacaacccacaggcttccgggccccgggcttccagactgagctgtttggctagttccttccacagcatatcgccggcaggagcaatttttggttccatagctgtttggttgggaaaacaagcctgcagttgccagtaaggtttagaatctgcctgccagataagggaatgtctgcgaagactattttccctcttgggaggcaaaacacagatggaggagttaggagccttacaatatttagctgctacattgatggtgaggattctgccacgcggatgctcacagttttggaaggcccagtttagcatccatgcctcaggcctcaggtaggggagaagggtaagactggcttcctccgggggcagtgagtacatcagtttgttctggaacattccactctgcttgcctcccgagatggagaaggtgctgaaagctgccatttcccctgatcccaatcgggatgggtagggaagagaaggatgaactacctgcccaggtgcctgacagggtggagaccgagggggaggaggagaagggacatgtgtgtcctctgggaatgagacacagatatcctttggatgggcttcttggactctgtagaataaacagtagctccagcctcatcagattctctgacacagagagcgggaggaggagaagggacatgtgtgtcctctgggaatgagacacagatatcctttggatgggcttcttggactctgtagaatagacagtagctccagcctcatcagattccctgacacagagggatgcattttattttattgatgtatttattttcgtagagatggggtcttgctctgtcacccaggctggagggcagtggtgcagtcatggctcactgcagccttgacctcctgggctcaagcaatcctccctccttggcgtcccaacgtattggaattacaggcgtgatctactacacctgatcatggcatgcattttaaaaaattaactgccctggcatgctgtgggcctcctagaagataaagaacaattacgtgttctgtgggattggccacataaaggtagggagattttcccagactggaaatatacatcctggaataatttctgggtcacatgaactggaaggaggattgagactttgtatccaaaaataaattttgtcccctggagaccaagaaagggggcaggtattagaaacaggcagagaacatgtgagcaccatcctccctgcccctcgctgactttcaggctctagaccacaggcttcttgggccctgaagttgaatcctgccccaggtagtctggaccttggatgagctggttaagaatgggttggaagtaggctaattcagccccagagccttttctggactttcagagtttcctgctgggactcttggtgcttctcttcatcaatgccctcccgattctttgcactagacacttgtccttttggagtcttatgtattaggccctgtttttgatgctgtaaagaaatacccaaggctgggtgatttataaagaaagcaggtgtatttggctcatggttcttccggctgtacaagcatggcgccagcatctgctcagcttctgcaactgcatgatggtgatgcatcatggagcttttactcacggtggaaggtgaaggagaagcaggagcatcacagggtgagagaggcggcgagggaaggggtgggggaggtcccagactcttttaaacaaccagatcttgtgtgaaccaactgagtgagaactcactcatcaccaatgggatggtgttaaaccactcacgaggcagggtctcgttgttttattttattttactttttcatttggagacagggtctcactgtgtcactcagttggagtgcagtggcgtgattttggctcactgcaacctcgacctcctgggctcatgcgatccccgtgccttagcctcccaagtaactaggactacaagtgcctcccaccgtgcctcgctaatttttgtattttttttgtatagatgtggttttgccatttttcccaggctggtcttgaactcctgggcttaaaccaggggtccccagcctctgggccatgggctggtactgtctgtggcctgttggtaattgggctgtcaagcaggagctgagctgcaggtgattgagtgttactgcctgagctccacctcctgtcagtggctgcattagattttcataggatcccaggccctattgtgaactgcgaatgtgagggatctaggttgcgtgctccttatgagaatctaatgcctgatgatctaaagtggcacagtttcacccgaaactctcaccgcctcccaatccatggaaaagttgtcttccacaaaactggtccctgatgccaaaaagcctgcggacagctggcttaagcatctacctgcctctgcctcccaaagtgcagagattacacatgtaagccactgtgcctggcccagagtgccactcttaagcactgattacataaacattgaggcaaccgttggtaactaaataaatcacacacatcagacaatgatttcatgtcccaccacaatgtagatttccagagagctctttgcaaagattggaggcagaatttcagggcatggttgtccagccttctatagctttatcctttagaaagacctcatgttcaggttgggaggcccagtgacttccagaaggaaaggcactcagagcctatagaaccctccttttatgtaacagacaaactgtgtcccaggcacttgcaggactctggggaccctgggcagtctgcacttcaggtgctgatcctgcggtgggctgggctgtcccgagtcagcccctccgtcctggtacagatgagtgagtcaacatccttcctgcagcagtaattaccttagttaaatgctgcaggagtggtactttgggagcacagaggagggagtgaataattgtaatttctatgtgataatgatgataagccatgcacatgtctatggggctttgcatcatattcgatcttcaccatgagatctctgggcttttggaagaaaagatcccagcaaactcctttgtagctgctgaatgagatcggtgtgtaaggtcccacggtggacactttcccagggagaaaaccaaaatcagagataattttaactctagagagaagatagagtggagctcattctcgcatgtgcatttcttgatatcatctcaattaatcctcccaaatcccctagcaggtagtagatagtatgattcattccattttccagatgtgggatctgaggccagagaagtggcctgccccaaacctgggagggccaggtctgagcatagctcttcctgacctcagagcctgatcccttcttcctgcctcaaacctggtggttcgagcatggttcttcccaattttagagcctgaactcttagctcttgcactgggcacaatgttggacaagacagacaagggccctgtcctcagaggactgataatatgggcgttgagggtggggagcagtaaacaaggaaaccagtggatatgatgacatcacagagcaataaatgcataagaaaatgaagcaggagaatgggtggggaaggacaggggtagtatctgtacttgagagagggtaggtggtcaggggaggcccccctaaggaagggacgctggtagctagaggtctggaggacatggaggggccagagcagggtgaagttctgggaagagcattggagcagaaagaacagcatgtgcaaaggcctcatggcggggaagagcgtggcatgtctaagggacagcgtgtaggccagcgtggccagacagtgatccctggggagaggatgggtggggtggagggcctttatcaggcgtggctttgtaggccatgctgatgagtgtgaactttcatgtttaaccagagggagtgtcttgagaaacccttttcgggtgcggagatgctcctaggtgccaggaatgagtggcttggattggctcttggtggccttcgttttcctctggagggatgagctggtgatttgtccaaagctgggaattagggatttcaggctcttcggtgcaagaaagatggacagcagcactggggatcctgctcttgaagcagcagggcccggtagctcctcaggccctggcatgagctttctgtgcagccccgggaggcctgagcctcccagctgtgggcgcctggggagagtgacaggcagagggcttctggaaggtatcacaggccgcttaacttctctcacctcaggtcccacatcagcccacagagtccagctgtgctgccctgcccaactattgctcacctcttccttgtacagactctgcttcttcctttgatcagggaggcttggtttggctaagtctgtgcccagaagagaagagtgaccctcagggagttgcagacatctcctgttcactgcagggaaactgggtcattatgggtcatcatgggtcatcatgcacgcagggtgagtttaagggtaaagagtcttggtgcttatagtttaggcctctttcccttgggcagtgcaggtattattgccaagtggtactgtcctcctgaattctagatcattcctaggcttatggaacccttgggttagcagaaacctttatgatcaaagccaccttccttttatgggtgagaaggccggggctcagagagggtaagggactggcccaggatcatacagcaaatcattagcagagccagaaccagaacccacgcatttatgtttatgtccagctcagttctcacctgaacacagtaggccctcctcacctcccccgggatgcccaggcagatccagacagtttgggggccacttgtggtaaactgaggctccagcttgtgtctgggtggtggggtttgtgtcttctccatctcagtagctctcacagcccctagggccgttcctggcccactgagtggttagcaatcactgttgtgttgattgactagcccccttgcttctgaaacttgtaatcattagaacttgttgcattgtggtttaagcaaaccaaatatatgacaaatccacatttctttctgaattttctgatatgcaggaatggcaagacccaaggtctgtccaagtctaacttgtgccaatactcgggatgcaatcaggccaggacgctggccctgagtttctggtatctggacaggtgatttcggatgcccttcagggattccagcaggcccattttagggtcagaccatgaaagttttggacaaagacaatcaaggctgaagcagctcaggctggggcacgttttggactctgctcctgaatgtgttcctatggcccaccctgtcactgtgtgacctgggcaggtctcttcactcttggggagctgtcatagccccaaattcagagtgcaattggcaaatgcatggagctgagtgtgcacacagcagcctggggaaagccggcccatcaaaagggaccgccactaccacctagcttccatccattgcagccgcctaggagtgtgggccgagtttgtccaggttttcggagttttaaaagtcagaaaaaaaggaatccagttctttttaaaaatttgtctctgttgttggtaacaaattcaagttttcaaaacactttgtgtaaacacaagtgtgtgtgtggactggctggagctggggcctgtatttggtgattcctgagcacaggggcagacacagtgtgcatggtgtggggagggctctctgcaaggagtggccagtgcggccctgagctgcccccgggacagcctggtctggagtgtatgaggtgcaaatggcttggagcattgcaggtccctggccccacgcttctcctggccctgagttctcctgctgctgaatatggctgcgccacagggaggccagcgaccgttcctgactgcatggggtaaggccgttgctcagatgtgggcagcaatgcagaagtccctatcttctgggggaggcagtcaggatgcccctctgcaggcatctggttccaccttccttcctgtctccccggcacctgagttacagggtgcccacccatcctatcaatgtcggcagtggggatgagggaggggatggccaagttccatccttgtgggcagttggacgacccctccccacaccacttgggtaagggctgcttgggaaaacacttctgcctcctctgagtctgattctgccctcacgtgtagctgatccactgacttttctccccttcatttggtggaggtcctgatccttcaccatgctgactgaagctttctctgggctgcaactggacaggggcagttgacccagggcctacactgaccctgggacaggcagaaggacaagatgctttctgtggtatgaggccacctgctgagtgagagaaagtgtcagggctgccctgcccacctattgctcacctcttcctggtccagactcttctccttcctcaaagggagccaaagacctcagcttcccccatatgaagagtctgcgggtcagagaggcaagcaggtggcccagcatcttcagagctgggggaggagatcggggcaggcccccagatagctgctgagcatttccttctaccgaaagtaccacgcagcgagcttgggcgtagtgaaagtgcttgggaaggggtcggctcggctctgggcctcacctcctgttggcccctgcccggctcccttgatttctgtactctcccttcatcctgttcacatgcaacatggagtttctgtgtgtgtaatattatttgtttttatttctgtaatccctttattgtttgcacaactgctgtcagactgttgcctgaaagtatcacaggataattgcagaacgcctgcataagtaatttcttatgaaatcgggccttgtctgcatataaaattgttttttgttgctgcatgcatggactttattatatcgaggctgtttacagggcttgcacctttcccacaggccacagagatgggagtgtctgacgccaggaaataatgaaacacgatcagtattcttttttggtcagatgacatttctggaaggtgatagtcggtctgacgcggtcagaaagagcctggccttggaaggagggaaggcgtttgctgaaatggggactcggggtccgacttcccaggattctgctggggaagaccactggctaagcccgccttgcactgggcatttcttctgaccacatttctgcgatattaatggtgtgtggtagtgaaagaaatgtgttttattctcgagtctaaccctgctgttatcaaagtaacttccagcttattagcgacaaaggacttttctcctctctgctgccctgttcgccagggcttcctgaattaaactgctgtttcctgtcctttatatgcatgaccacatctgggtagcctgctcacagccctgctgcttaataacaatcaccttccctttcagtctctgttgattgtttctaattcactctgacagatagtgcctgacaacttgccggcttttccctccctccgtgacctgaagttactcacagcacttatatagtctgtcatttttaatatttgatttcattttaagttatgtgttttactgagaagatgaaaccaaaaaaaaaggggacttgtaatggaacataaatttaacccttcttgccattcggcacccgacgggagaactctccctgtgtgcctgggcgacagcttctccttttctggaatccttgatgctgctactgctgctggattttcttctctttccttccttctttttttctcttctttttcttttttcttttcttttctttttttttaagccttctttttttcacttctggaaacaaaagctttatgtcatatttttttccctttaatggggcttgattactttatggagctaattatggtgctttttgctttgtaatgagggtccaattgttagagatttggggggctttgctatggagggagggcatccggggagaggcctggtgaagtggaaatgactggcttccatgaaggcgtcaaacacgcgccatggacccttctttttggaggtctttctctttgtgccagctgttggtgcagagaaatgccacttctctctgggcttgggatgtgccactcagagtaggaccttccaaagagtggggaccaggtgggtggtggggttgagcctggacgtaaatttcttctgccacgttcactctgaatctgcccctgcgggcggcctggcaaggcaggcgtcctccagggtggggtgggtggggcgggcatcccacatcacttcagggtccactccgctgtgactttgccttttgtttgacataagacaaaggctcctgtgtccctcttggcccttcagaggtcgagagctgtgaggccgtgcattaggtcagctttgcaaatagacaccaccaactaaaaaaggaggcacattaacccatgacgcctcactgctgctgctggtcctactgtactgcgggtgtctgtctgtttcgcacagtggggcacgggcagttgagaaagtgcaggaagagagatctgggttggatctcagtttgaaacatttcaacttcaccatcgtccatggcccagcctccctggaaccaaagctcctctgagtctgggagctgccactctcaaggccctgtccaagggttttcagatacttgcagtggcaattgtgccaggggcagaggtgtgctagtcctccaggcagaggcgggcggctttcctagtgagctccggaagatgagagccgcatctcaacactttgttgtaaaggtagtcagctgggaacagcatgatgcagtctggtcctctaggaggccactttgcagaaagtactaggcctggactccaaagaagcaaagggcctccaggtagggctggctccactgtccatggtgcagacattctggccacttccctgctgttctacgactcttggctccaggcctgtggaaggaagtcgtgcaggggcagctactcctgtcttgacccagctactcccaccatgactcatttgcctggagagtttcctttgccaagcctactccttcaagaaccttggtccttgaaggacttccttccacaggcctggaatgtttgaggtttagcctccagcaaggccaaatcaagattttttctttctcctccccacaaaggactgttgggcttaccattggttcttggttcttgtttatgagtgtgagaggccaggggcagtggctcactcctataatcccagcactttgggaggccgatgtgggcagatcacaaagctgggagtttgagaccagcctggccaataaggtaaaaccccgtctctactaaaaatacaaaaattagccaggcgtgatggtgcgtgcctgtagtctcagctacttgggaggctgaggccagagaatcgcttgaacccgggaggcagaggttccagtgagccaagattgtgccactgcactccagcctgggcaacgcagcgagactccatctcaaaaaaaaaaaagtgtgagagaaattggggtttgaaattaaggaaaaactttgacgtggctctcgtgcagcaggtctttatgacgtggtgggctgggacaagctccctggaactctaggctgacaaaaggagggggacacagtatttcccgacctattccccacctgcccagagcgctgcaatccagatcttctgtgcacctagcatcggcagcatgtatgttcagttagcactgaagtctggatgaccctcggtggcactgctgttgtgaccccttgagttttctcaggaggcagcctatcaccagggctgtggattcgcggggacctgagaattcattgaaaactgacaactgagcctaaaaggacgttgcctgtagggaagtaaggtgcgcactttttcagtacactctgagctggcagaagcatacacagagcctggctactctacccggaaccaccatcctaggcaatgatgggctacagctacagacgggaagaacctacacatcacaaaccacatcgcaaagtagaacacaaccagtgccacctccgagattcaatggagagccatgaattctcaggcgagatggagagatcagttaataaaagcaataagaataaattgttgactgataataaaggagctaataattgttgtgcacttcctctgtgctcagcactgtgcaatcatttaaagagaggaaaaactgggctagttttgaggccaggaagagcttcatggaagggctggccttggagctggaccttgagagaccaggaaaatattcaccaatcgagatgggagaaggcaagagagaagcttcttgcagaaggcaggggtttgtcagatgcatttgcagatttaggagggggaattgaagtggtcattcccagcagatgcaagagagggggaatctggaaaaactgagggcagataggtgtgttggagaatgttaagcatctctgtttcattggaacttaggatacaggtgtgagatgtataggatatagcataagagcaggcaagcgtggaggtgtaggctggagccccacggtgaacaaagctgtgtgcccaattaaggtatttgtgactcactgggatatagccaagaatggagccgctagaaaaccatttgctgaactgacacagggaaagtgggaatgggagaaagagagtcaccctagccaggcacagaggctcatgtctgtaatcccagcattttgggaggctgaggtgggcagatcacttgagcctaggagttcaagaccagcttagacaacatagggagaccccatctctacaaaaatatacaaaaattagctgggcatggtggcgtgcacctgcaatcctagctactcgggaggctgaggtgggaggatggcttgagcccaggggtcagtgagccaagatcccaccattgcatgccaacttggatgacagagaaagatcctgtcttaaaaaataaaaataaaagagaatcacttcaccagcctcttgcagaacttgctgttgcctttctctcgattgaggcttatagtgactgcaggaagaaagatggaaattgggacaagctaagtttggggtgtccagaaagtgtccagcctgcacagggtgcattgcaggcagtcccagcacgctctcaggccagggcatgaactgtatacaagcaacttggccttaaggtaacagcaaaaagtgatgactctttagaaaagaaaaacaccctttatattcatcagggtcatatgcgtttttcttttcatatgtatacaaaagaggtactttgggtgatacaaggggtatatgccaatgtcaagagcaggcaagaacaatggaaaaattagcagattcatcagttctcctgcttatacttcagttccaagagtaaaatgttagtttgttcaactctgcgctttacgccttgatcacagtgtgaaaagtgttgactaagcttagcttcctggtcagagggtcaagacccgtggcttttaaacatgcttatatgaaatccaaacattcatggtcactagtgatctgaaatcaaggcacaacttatgaaatgaacacgtaattatcttgtttactcagggtataaatagagttcatgcattttaaaatttttcttcctgaaaaggacttgcgccagcatttggtctttagataggcatgtgctctctctctctctctgtctctctgatgctcttgttctttctcttcttcatctttttcctcctgtccctgttcctccccaaactttccttctcccctcccctctctgttgtctttctctcttccctctctcttcctccccctctctctcctttagaagggaagggacttgctagtgcttgttgcccctgcaagaggcaggaacagccattgcagttctttctaggagtatttcctgcttcccacacagctttggtggggggaagatgctgcccagggaatccctggtgtgcttgaacatagcattgccacttctatgaatgcaggcaagggccacgaagcccacgtctgcttcagacaacccagctgaccaccaggtcccgtgtagcaaggactcccgtggaggtaaccttcccaggcactccctgtgaggctctgcttctgcggggaatgagaggactgactccttagctctaagctggccacttccagcattcccacacctaattttggagtttttccagagtgagaaccacctgcttgtggactttaatagtttttaagtaggcacactttttcccataacatattatatttagctttgtcctggataataatagctacgaaatctctggttgaatttgccagttatatatttttcatatgaaacatcagaataattatataagccttcattttttaaaaaaaataggagtttctctatgtatcatctgaaatcttgctatgtgtctggtgatctctgtgcaactttggggcactgtttgggattttcatatctagctgggttcttggaatctagtgcaaggaagtcacccccgccgaacccctgaggaagccccacgtgaactcctccagcccacagtaagttctcctctgtcttcatggtccttccctttgaatccctaattgccatttaatcatatgccgctctggtcatatctgacaacactgtgagcggctgctgggcaatgctttctggctctgtcactttcccttctaaattgcaagactcttgagagtgggcaccatgttcttccgtgtcaggcaaagtgcctgatcaattgagctagctgtcagtctgtctatctgtctattatctacctatcatatctctatctatctatctatctatctatctatctatctatatctatctccttccttccttctttccttccttcctttattcatttcttcctttctccttctctccttcccttccttttctctctagatctatcatcttatctgtcaatctatctatgtatttagcatctctctatatacagatagatctatttacctttcttcctctctagatctatcatttgtctatctatctatctatctatctatctatctatctatctatctatcatctatccatctatcccctattttccctttccactccctctcttctctttcatcctacttgatgagccaggtactgtttttggccctgagaatgtagcagagaacaaaatagccacagtccctgccctcttgtagctgacattccagttggaggagtcaggcaataaatacataaatactattctataggaagaagctagaacaccatttgttagggcaaatgccacaccaagtgttcaaacagggggatctgaagctgagggactgagggctggctgagactgtgtgataagggaaggccctctggggaggagacactgagtcccatggagatggcagcacctggacagaggacacagcaggtgtaaaggccccagggcagtgacagcctggatgagtttgaggagcagaaagaaaatgcaataaaaggatgacacttatttggtttcaacttcgacaagggtcagtttttccatttctcacttgctaggggcagtggccccttttccatggaagaaagtctgacctctcacctctgaaagaccctccgccacatcccttctgctggggtgcttgggacgttccgtgctgttcccttgcagggttggagggtgggaggggagcgtgccgtggtgaggccaccgctgacatgctaatatttcattttaatcttgagtgccaggttacttcctgaatgaagtgtctcagacaaggctctaacttacatgaaataaaagagtttaatgctaattacacatcatctgactaccaaagccatatttattgatggcctaaaaacaccattgaggtggatggactgggtatctgtcttggctagaaatgcacctggagtccctttagactcctttgcaattcacacctgcacgccccatgcatggcaaagcccagggcatgtggatgtggagtgcggggagctggagcgatccctttggctttctctaccagctggatagatcagagccttcaatgcccatttgattcaggaagtctggggtggagcctgagctgctcacctttagcccctgggaagtgctggtgatgctggtcgcgtgacagcagcgcagtgagacatgagagtctggagtagctgaggggcgagcgctctctgatcttggctcctggcctcacagatcacagggaatgacaccgatgagtagagccttgcacttcaccgtcttgcctaccacctcgatctctctcttctccttttccttcttcctgtgtcccagtccttcctcctgcaccttcccatgtcggttttgctgtgggctctccaaggctaagcacagcattttctcatacttgttaaagtatccattgcacagctggaccaccatctcccaccctgtgccttggttctggtcgtctgaacttcatgcctggtctccccacctagactttgagccactgaagggcagagcctctgtccctccctcctactcctgtccctcctgggttcccagattcttcttgtgatgacaaggaagaagcatatactcccccactctctgcaaggagagactcatggagggcagagctggctgcagcagctacatgttgattgaaacgtggtggggtggggcccgaaacacaagtcgtgttcttccagtccatcctccagcttctccttagcgtatcttcttttgaccatatctttcctctcatcagcattctctgaatggtgcacactacggctgcaaaactctagttgccaaatgtgaagtgtcaccaaatcctctccctccatctgtctacacagaaacctcactacctcgcttgcctttgccctttgcaactgaagtcacacggacgtcctgctgatgtgcctgcgagggcaacagcatttccatcagtgtctgaggttgtgaccacctggagaaggcaccctggtggctgtccatggggaatgtgggtttaatgttgctagagctttggatttttcaagcaaaagcaggaatctctatttttacatgaaactcaacacgttgatgacccttacatatctttgcttaaattgccatgtgagccacacaagttatgagttggtggaattcagcgagcagacctcaaggtgtggcctctggtacaaaccaactgtagggaggattccatggattcgacagcggagaatctcaccgggtccaagggaggggactggtggaggctgagtcttcagctgctccgcttgcttggtgaaggattatcacatggaaagggctttgaggactcaggagccattttgcaaacgtagaccctgatgtggctctcaggcctcaggaaaactcattctttataccagcttgtctgtagcccacctataattagcatctgaaatttctaaatgaactgactgatccagtaaatttagcaaacttgttgtgaagtgttaccaactcgtctccctccaactgtccacgcagacgccacactaccttgcttgcctttgctctttggaactgaggtgcttatgtgcactgtctggcagccacgcagacatcccatttatgtgatctataatgagtttattagtgtttcactgccttgttgctattaagttttatcagtttcagcttcaagagcacaaggttaaattttcaatagagttttcgcaaagtttaagtgggattaagattgttaaaaatatgtccaaatggtggaaacatgtatttggtttgatgatactatttctgcccactcaaggattttgatctcttatttataaatgtaacacttttctgaaaaccagaatggtagcacagggctcggattttctttttgcaaatgaaacatgaatgcattaaatgtggaggatcacactgaagctgtgtcaattgagtccgacccgtctgcgattgtgcagtctagatgttgctgtcactgtcccggggtgtggtttttgactggctgttgctttgacctggcaaataaaaattgtaaaggaaaagacaaaattcttccacaaattgcaaagggatgaattatgacattattttctccctgtaccataagataagcaggttctcctctgaaaatacatgtgtgcataattgaatattgttaacctgggtctgttctgtaattcttgagcaatttttttttagaaggaaaccaactcaggagtttcttcagtggctgcaatcagaataaagtgtttccacttttagattaagagaaaaaaaaacagtaataggctgggctgttattatggaaagtttattattattggtacataagctagctgggggtttaagcacagagcagttggataatttagctagctcctggatccaattaaaaaaaatatatgttgtgtccacagtggggggatggccatcgctgagaaagcactctaacgtggatggtgacacacctgtggcattctcttggttatacgcagtttgggatgcagaatgctgtaaatcctctcattactgccttagagaaggcagacacttcaaacagttctccatttatctgagattaccagttaaactcgttaaaaagcaactatggcttgttcactcaattggctgttgggaagatttctgtgttctgtagcaatggcgacagcgtggctttgattagtggagtgctatactttttaggggagaccttttctaacttaatttatgactctggttgaatggcgtctgtgctggggtattacgtatttccccaactattgtacctgatgtcaataaaggtgcatttagggaaatttgaactaaaaccccagggtgtttttgttctttggggaaccaatgcgccataaacattttgaacttgagccaacaacctcccctgaccatgattgcaaattactgtagaatgtatggattgctggcggaacactatttgaggaaacctgtattttatagaatgtcacttttatgcacaatccaggcaaaacagaggggaaaaaaactaatttaaacagcagacagtgttctcttgaatgaagattatgacaaagaatgttataaaaatcaagctctaaatatggctttttatttaatcattattacatcaatcatcaatatcaatacttaacagcaagctgataatgtagccagtaggtgaaacagctattaaaaagtgtaaaaaaatgattaatcaggtacgggggatattaatgccctccaattattaaatgataagtacgtatttttggaagtgtttgtttttaataatcaactgtaatattagtttgcaaaaacgtaattgcttcttaattttgcattttagcttctttgtgctgggtacaaaggtagtatgtttctgtagttattgtttgcagcactccgtgtaaaaaatcacgttcatttcaagaagctgttatggtattgattgtggtaaagacttccattaactgaccaatctaaatctcataagtgatgtcaggatagttatgcatttgcttggttcaagtattcagccattatgttagaatgcaggcagtgtctgaatatggctgttaaattatttctaaataccgaaccagaacagcttaacagttctgcagtttgagactgacacaaaaatgacaatctgccacctctttgttttttaaatattaacgctgtattgggatagtatttttggagtaaaaacctgtggcacgagaggataagtgacataaacaaaggcagctgggcttcatgaaataatggaacaataaggcctttgcagccgctctcatcactccagtatgttaattagcattctgttgtggccgcaacactgaaaacatgtaatctgtattggtgtacagtacagctgtgaacacacattcttttttgtgagtccctggagttagccttgccattggcatatgcgtttgggccaaaagtcaagccatcaccactaaaatagcacaccatagcagcaaaatgtcatttgtcttttcttgtttttttttttttgttttttttttctctcccctcaatgccacatgctatccagtgatgtaatctagtatcactgcatctgcctccctgctgtatttttgcaggagggtatctggatatctgtaggggaaaggagggggcattgccagccagcaggagatggaaaaggcagcggccccaaaagagtcaaattagaaaataaattatttctttttgcattatatgtttaaatgcatatatagagaatatatatatatatatgcatatatatgtgtgtgtgtatatatataaagagagaatatatatacattgaagaatctatgcatttaatatctgccacctttttgcatagattcttccttaagtgtcatgaaactagaatccgctgcttgttttcgtaaggtaaaagaagggcagttaatttcagcaccaaggcttggaggaaatgagacctaagaaaaaagaatcagagtaaaatttacccttatttatcatttctatttagaactgggttgacagtctttcatgcatgtacttaggatgggattggctcttcccatttcagagctgacaaaactgaggctgaggcatggtccaaagatgggccctaattgcagggcctttctggcctctgtacagagagagtgaaaacaattggtcattttgagggaaaggggttagcaccagtgagcagaggcagttagtagctgggagcagtgactccagccttcagaggcaggactcagaaaggcctctcttgtgtgattttgctgctcacacgtggcctgctgggagccgcccctggtactgccgggacacggccctgggattttgctgaggccagctttggaacaggggaggtgagtctggagaagagagtttccacgttgtcatcataggatctggactcaagtgaccaaaaccttgcttggatttttacctgatgaagtttgtcttgaaaagtgaaaatggttccatttccattttccctgttctcaaggtaattcagctttctttgtgtgtgagtgtgtgagtgtgtgcaagtgtgtgtgcgtgcagtctccccagcatagaacacccacacatgcacccacccacatgcagacacgcacatactcatgcatggattcttgttcacgaagtacacacccttttgcaaaataatttttgaataaaaaattatagccctttaaatttattataatttagaaagggaccatccgatggttaaaacttttcctataattcctacattaattctctccatcacccgccccccccatctaatctgactgtaccaaaagatttgaaaacaaagcaaaaacaccaaccaaccaaacaaaacaacccacctgcttctaaagtaactttcagactccctgggcaaagattcttgtctctttctgaaagatgagcatgaattctgagctccaaattttgcttttaatctgtctccaacctaattgaaaaattaccataccacacaaagaaaactccgcatcgggatcaccatgctgatccaattgggttctgctttttgacgttagagaaatcaaattgtctggcgatttggtgacatgcttgaatgtccacctgggagaagactaggttaaaagttaatagcacttgtgcttttcttccccccgacctttttttaaactccagtagaacggaactcttccccactggccaggccctcatcctgaatcccttgtccagcctggaggtcttctgagagttctcagttggcacctttcccctgacttgtccctgtgaggtaaggcagggctgacactgagattttagttctgttgttcttttttttttcctagaaattcacaccccccaccccttggttaatggctctttaaatattgaaatgcctggaaaaacaaaacaaaataaaataaaatgcagcctgtcaaagaaataagaacaacaacaacaaaaatgttggtatcttttagaatgtgtcttcctagtggtaaaagtatataattaataggagaattttcctccagatgtggctatactataatagagccttataaatgctacagaaagaaaaattgcttggaacgaaggcgtcctcaatgagagcacacctgggtctgacaaagattgcatttagggactgctgtgctatcacaacgcagagaaagaccaagtctctgggagcagctggagagaaagccccggcaaatctgcatgcaaatagcagcacattgttaacttaatcagatgccgaggaaagatgtgccagaattccaggatgatctacacacacggaggaggagcggcctgagctgcagtgggagccggggccaaggtgggcctcagcaaggtgcacgcggcccggccccagccccagggccgcagcccacccgccgcccgcctgttttccgggcctgcagtcaattcaccacataatgcccgattcgctctttgcaaagatagaaacgatagagcgtatttcaatgggatggaagctttattattattattttttaatggtgatataggtatgggcattatttcgcctgagtccgtaactccaattaaataatatttctgcttaaatatccgggtgcatgaagataagaaatattgccctggagtgtataaagaaagagtttttttttcaataagaaaagtagttctctataggttgaagtgctgggtataaattgcaccttaagaagaagtggaagacacctgttatttatattttatattaatattaatggaaatatatatatcttaaatctccatcttttagtctagcaccgtaaaaaatataaagtaatactatttaatcacccacagcttaatagtgccttagttgtttactgccattgcactaattgctctgtactaatgtgtttttctgtgatatccagtagtgctaagagaacagagatccataaccaattaaatatagtgtttttttttaatgttaaaaatatatctggtgaggctagaaaaggaatagaaaccgccctgaagaaaggcgccttggcaccgcctcggtgcccaccagaaggtgcccggattgcctcttttgcgcaaagacaaagggggtaattttttggcaagaaaacaaacccaaggaaaacacaacaaactgagtgttgtttttttttctttccctcctgcaacttctcggaccgtctctgccctctctcctccagagagggcgagtttcatcctggagggaggccgggggagctgcgaggccacccccagccggcgcccgggcggattgcgagcccccgcgggtccggccgggggagcggagactggccccccgcccgggctggggcgcctgccgcccgcgagccggaagagcgccccattcacgagcaggcagccctggcagagggttaattgaggatcattgttgttggttccaggaggagcgaagcgcctggagatcgggcgcgcgggcgcggctctgggagcgggggaaggtgaggggaaatgggacatgatggcattaataatcgttaccaaagacggtgggagtaacaaaggaatgcgtctccgagacgccgcccagccccggggtgttttctggcgcggtcgcggtgcaggaacgcgagccccgccgccgagcctcccgccgcctgcgttcgttggcgcggcgcccggcggtagtgccaccccgaggccgagcgctgcccccgccggcccgcggctgccagccggccctgcccgcgcccgggccccgcgagcggccgcacttcaccttacggaggggagataatgagatcaattagaggcgccgtcaccgcgccggagacagctgccgccgcatagtaatcacccgcgggctgggtgcgcgggggctccccgctacctgcgcgcctgctgctcccaccacgcggcaccgacccgggcgcgcccccggcccctgtccgcagcccacagccacaccgcgcaccctacaccctccttgcgcctctgctggggagctcaccccctccactcgcacagtgcgctgcggcccggggtgtgggaggtcccgggacttggggtgtgagtgcctgtgtgggggtaggggcaggtgtccgcttgtgcgcatatgggcatgagtgtacatggcgtgtgcctggagatgggcgagtgcaggctggaatgtgccggcgtggcacgtgtgtgggcccaaatagatgcgtgtgtgatcacatgttgtgttcgtgtttgcacctcgtgtgcctgtgtgtccgtatttgagtgcttacaggaatgtgggtggtgagtacccgtatgtgggtgctatctgcacttgtatgcgtgtgtgtgtgtaggcgcgtgtgtgtgcgtgtgtgtgttagggatacgtgtagatgtgcattagtgtgactgtgtgtgctcatgtgcctgtgcacgtgtgtttgaggtttgtgtgcatgggtagcgtctgtgagagccatgtgtatatctgcatgggtgatgagtgtgtgaatgagtgtgcgcgggtgcccactccatgtgagtgtatgcccatgtgtgtgcttgatgtcttgagggtggggacagctgctgtagcgccctctccctcaaccccttgtcctctagtggctccatgggtaccaaggtttctttgccaggcagttgtccctgaggaaatttccagtgcccagtctccctggtccataccttggcatcccctctcccccaatccctatacacgcctttgttgagggtgatggtgatggtggctcttgacctccatctgtgtctttgccctggtgtatttgcctttgtcggctggccctgttccaccccgcagagggcgatggtgtctctgacctgagcatagaggtgccttgccatttgctccaccccagccccctgcctcccactacttataccagataatgaggctgggaacagccaccagagccctcacagacccagggtggtgcagcacctgtcaatttcacacagatagcacccactggatactccgtgggtctgggcagggcatctgctcactttcagaaacagaatgggccagggtctgaagaagagtgggaagcagctgtggtgggagtgagctgtggtgggagtgtcagtgagctcagggcctttgcatgggttgtttcctgcctggaggcacttttttcctgtgactctcagctccatggtgtgggttccctcttcagcacatcctccctgacactacccagccagtattcccattcagtcactcacattgtccagttgactcccttgactgccgcctggctcccccattaaagcacatgtgcctccccctgccccgaccccacccccaggctaggaccttaccttcgggttcattgctgcgcccagcatctggctggttctgtgtgcacagtgggtacggggcagatggccaacaggtgtttgcaggcctctgctacttggctgccctgtgggctcatagtccatcaggggaggctggcaggcatgctgggctagggacagggccatcctgacatggggaccctggaaggggatggagcttctctgtcatcgagagagccaacgtggcctgacactggggcaaagatgtgaaggagaaagaaaggggacaactgtctccagacttgcccactagactgaaggcctcatgagggcaggagcctggctcaggttctcgggaaagctggcagcccctctggtctcagagcctcgggatgtggtgggagtcctggatgttacccgtgtgggccgcgctcacagaactcattgtgttacaggaccccaccactcacccaaagttagcctttgggccaggggtttccacactatagtcgcttctgtggtcgccagaatgatgttacgggaaagaggtaccgatccagaccccaagagaggcttcctggatcttgtgtaagaaagaattcagggcgagtccgcagttcaaagcaaaagcaagtttattaagaaagtaaagtggtgaaagtacggctactcgtagacagagtagggcgttcaggaaagtaagaaaaggaatgagtccaccctaggtccaatgctcgtatatataggataaaaaagatcatggggagatgtgctctgctacaagggtttgtgaaaagggagtaattttcttaattactatattttgcaagaattgattttattatctttaaagcaaaattaggaatgcctttgttctcaagatattgggatattaggatactcccaaatctgggtctgttgagtaaccattatcaatctgctcccttaaccataaacatctagcagctaggaatacctcactttctgggaatgcagtccagcaggtctcagcctcattttacccagctcctattcaagatggagttgctctggttcacctgcctctgacagttgggtggattctttgttgcccaataggctcccaaggccaccctctccagctgctgggagtctaatttcaaccctgtctcctcaaatcttgtgcccctgaacaagtgatttggccttgctgatggtctcaacatggtctgagagtccctgtgctgtcttccctaatgccaaaatggacttggcaatgagtggaggcttcttagtcgccccagcctggatgccctaaccaagtttgggtctactttttatgtttttttaaagacaaattttcactcagtcacccaggctggagtgaagtggcacaatcttggctcactgcaaactgcctccgtggttcaagccattcttgtgcctcagcctctcaagtagctgggactacaggcatgagccaccatgcctggctaatttttgtatttttagtagaaatagggttttgccatgttggctagtctggtcttcaactcctgacctcaggtgatctgcctgccttggcctcccaaagtaatgggattacggatgtgagccaccatgtctggctaatttttatatttttagcagagatggggttttgccaggttggccaggttggtctcgaactcctgccacatttgggtcttcccacacatgctagtggtgctgaatcggggtggtttggctccatctgagataatgggaacatcctggctgctcttgaaagttctgccttagacccaactgcatctcccttgaggtctctgcccttcattgtcttctttccatctcctgcattgctccagccgaggtcccttttgctctaaaggagtgggacaggaacaaaaactggtgaactttcttacaggaaagaaaagcatgaaaccttgagtgccccttaacaaggtgggagatggcttgtctctgttctggacctcccgaagttgttcacttcaagttttgaccccctgagggcctcctgtgtgcaaaacgctgtgccagtgctggagggacaaaggtgtgggcctgtgtcttgtctctcccaaaggatgttgacaggggtctggatttcccagagtcccaggcataaggagtgtggggagggggtgatagctccagccctgtccaatgctttggtcctgaagatgggcagttggaaataacacatgtgccgtcaccttgaaaacctcggtcaaatattgtttgaaatatggaggtgatggttattatttttatgtcccaaatgtgatttgttttgaagtttgtgtattctcctgactagagctttcctgacaataccgtgggaaggtttgagtaaggcatccctctcccacttttgtttgtgagggtccagttggtcctggccacttcctgaatggcctctgtgttgggagctcccggtgaggataagaaagagaagccagcctgagctctgtgctgcccggcatgatgacagtgatgtggtcttgattctttgagcgtcagtcatggctcccaagtctggcaaaatggactcctggctgatgtcttctccactgagcctctgcaaccccagtgcgtcatgggggtgtgttgaatgctttctgtggggttgattcctgtcgccataaggaggatggggtggggcagggatgtatcatcgttgccaggagatctgacaggtggaaggggtgaagggtggagaggatcatgggtgaggaccagaaaaggaggggtggggcttgagggtagacaagcagaagggctggggggtgtagtgggtatgcggtgggaggtgggacgatgcccaagtaggctgctcaggggtggtgcagggtggatgaagggaagagatgccataggtgggagtactcattccactggctgcaggggatgctgtaaggggtgctgatgcagctttgcaaagccaccaaggcatgcctgggacctcctgtgactgcccgtcactcaggagctttctctgtgccaggcactgtgctaagtgccctacttaccttgcctaatttcatcttcactggggaagtcctggcgaaggagctgaggcttttgatctgtgaatgagagagctcagatccagaggggtaaaaatttgccagatgtcacagagctggccagtgatggagcagggacttctgagcccaggccaccaccgccgaggacatggccactcttcgtgtttcctgcacagagcagctccagcagggagctgagctgaagaccccaacagaagaagtcaaggcaaaatatagcccaagtcctagtgcattcttcagggagggcctttctgtgaaaacagatttttttttttgccagccgtcagccttttgtcccattttcacatggcccaattagacaattgcaccccctaattagccagccttaggcactacttgttgcctgcatagaaattcacacatggggttaaacgttggcaggaaacttcgtccttgcaaatgggagccgtggtgtcagtgttggagacgggccaccctgcagtgcatggcccagaccatgctaaacccagccaggcccacgagcacccccggagaacccacggctcggccctgagacactgtgaggccacgtgaatctgagttatcagtggccaaaaaagaggggagacacagaagagtcataaatgttaacttttttagcactctgtaattccaaagtgattcaactgatttgtttcaaactctgcaggaaaacccagctgtggcatcagatgtgagccctctcagaccagaaggaaatctcttgcccttcgatgcttagccttaaggcagtgagagggaggaagctgtgttctgatttcccttagaagtgcagcttcctgaaggaggagtgtgtggcattttccagaagactcaggtctggctgcttctcagcaaggaatggtcctgagtccacccaggtgcccgatgcgtgtttcttatttattttaaaataaatttatttatctaaatttatatattgttacatatttttaatttttaattttagagacaggggctcactctgtcacccaggctggagtgcagccatgcaatcaccgctcactgcagcctccaactcctgggctcaggtgatcctctggcctcagcctcctgagtagctgggactgcaggcatgcaccaccatactcagctaattttaaaatttttttgtagagacagggtcttgctatgttgcccaagttggtcttgaactcctggcctcaagctatcctcctacttcagcctaccaaagcactgggattacaggtgtgagccaccaccatgcctggtctatatatatctaataatcagcacaaaccatgcccccagagggagctaatatctcttgattagatcaatgctcctttgcatctcctatgtgccaggcactgtgctggggactgggtgacaggcaagttccttgtttaagttatggggagggagaaggcaggggtggatagaggctacacagtcacctcatacatgaacaggattattcccactggaaaaaagtggaatgtggcagggacagggtgcctcattcagatggggtggtcttgggaggcctctctaaggaagtgacgcttgatctgggactggcatgggaagatggagccaggcttccagacagtgggatcttgcagggcacaggtcccaaggaaggaacaggcctggcacgctggaggatttggggctggagcatgagggaccagggaggtgagatgggaaattaggccataatggccccaggtcccagagcctttgcaccattgcaggctggggcaaggggctaattccaagggccataggaagcctcaaagggtatggatgcggggtggttgatggggaacgttgtaaacaggctttctttccatggcaggggacagtgcaagggacagaagcgttcagagtctgcagggaggtggagctgaccggagcgatctatgtggttctgtgtatttcatctcttggcctgtgtgtccccatcctaatatccttgaagtatcaaagcattgctaaataaatacccatgaagtttgctacaggggaagccagcaaaaagttcttaatttaaattcttgttttggaagagaacaagcagagagaagagaatgctttccattccctggtttaagtctcaatgaaaatggccatgtgagacattttgggtaaaaatgaccttctttggctcccattttggctgatgtgttcacttcttttccacggattgctacctcccctccctgctgcccccgcctgcaaagagacagctctgcatccatgtcccatttccgtgttatggctagcgacagacacagttattagaagaaagttgtccgatttgaattaagcataaacatgtcagcttagtggtctggacaccttgtaagtccttgtgcatcatctgtgcaaagctcttatttgatggtttgatgaagtttcggcaactgcatggtctatccagtgcctcccgtgctttttctccaagacatttgggtggaaaatccacaaaacaataatagatcaatacatttaaattagaactttcaaaaattcaataatggtatttacaaattaataaagcactgtaaagaaaatatctgcacttctttatttagggatacagttaattttttcattgattaagcattcttttggtggatgggatgtgggcagggaattttttttttttctaagaaggaagttctgtgtgaaaactagaagtatttgcgtgtttttggtcccacttgtaagttactaatgcatcacccagacaaaggccgatagtgagggaaggaagtatggcttggcttggcagaagctaccgcagaggtggaatccactggatcccatgtgatctacatggttgtgatgaggatggagggaagggcaggtgtacaaattcctgcggtgggcggctctgacttctgaagcacacaggtgttaactgtgtgaaggaaatttggtataggaaattatcatttagcaaacataaaccagggagctactcttctttgtgcaaaagaatttcccatagaaatccttaaaattagcccagatagtcttgcacaattaaaatcaaatatatttctttttctcctcctaaaaacaacaaacgtggcaggtgtggtggtccacgcctgcaagcccagcactttggaaggtcaaggtgggcggatcacctgaggtcgggagttcgagaccagtctggttaacatggtgaaacccagtctctacgaaatgtataaaacttagctgggcatggtgctgggcacctgtaatcccagctactcgggaggctgaggcaggagaattgcttgaacccaggaggcggaggttgcagtgagctgagaccatgccactgcactccagcctgggcagcagaatgagactctgtctcaaaaacaaagaaacaaacaaacaaaaaaaacaaatgcaactcaggttttcaagactatgcctcctgtatccaggaaggtagatctgtaccttgctaaggtctggggtctgcccagttcagatggtgaacaactgagaaagagttgctgacaagttccaggaggccctgtggaggtggctgcaccccaccaaccactctgctagctggatgtggacacagcctaaaccacgtacacacctgcatgcctgtggcccagggcctgctactcacttactcctcccctttatcctctcttcttctgcccaccttccttcctttctttctctctttctctttctttcttcctttcttccttcctttctttctctctttctctttctttcttcctttcttccttcctttcttttctttctctttctttctttctttctttctttctttctttctttctttctctttctttctttctctttctttctttcttttctttctttctttcttttctttcttttctctttctttctctctttctttctttctccttctttccttccttccttccttccttccttccttccttcctcccccctccctcccttccttctttctttctttcctttcttcctttcccttcccttcccttcccttccctcccctcccctcccctccccttcccttccttcttccactctgccagctggatgtggacacagcctaaaccacatacaccacctgcatgcctgtggccccacggtctgctactcacttactcctcccctttatcctctcttcttctgcccacctctttctctttctttctttctttctttctttctttctttctttctttctttctttctttctttctttctttcgtttccttctttctttctttctccttccttccttccttccatcctccctccctccctccctccctcccttccttctttcctccctccctccctttcttctttctttctttcctttcctcccttccctttccttcccctcccctcccctcccttcccctcccctcccctcccctcccctccccttcccttcccttccttcctttctttctttcccaaaatattgattaaggacccatggcagaccacaggctgtgttaatgctgggggcctggtggcgaagaaggtgtcatggccaagaccctcttgtggatgcacgatcccagtgggctggcacaaagtggacacccagtgcttttcctattgaatcatgtcctgggtgggaccctgctttggttgcatgggaccttcaggcatcgatgtgggtctggacacaggattcttcttcctgcattggatggaaaccagaaacccctgtggagcatgagggtcaaaggtcatccacttcttgcaccctgagggttgagagaggaggaatggcttggaataggggtaccaaatggtgtttagaaaatatgtgttcagccaggcatggtggcttacatctttaatctcagtgctttgggaggccaaggtgggaggattgcttaaggccaggagtttgagactagcctgggcaacagagcaagacactatctccacaaaaataaaataattagccaggcgtggtggcatagcctgtaatcccagctactcaggaggctgaggtgggaggatcccttgagcccaggcagtcgaggctgcagtttgatcacgtcactgccctccagcctgggcgacagagtgagatattgtctctaaaacaaaaaaaaaagcaaacaaaaaacccagctccacctcccattggttgccagtccttgtcacctgcaggataaaggtctaacacccggacttgatgtttgaggccttccctgcagcagctgccccaggcatccttctctttcattcagggtaggaagggcctttccaggagcaggagcagccctgaaatcgggtggaaatggacatgaggaaggaagagccggtggtggagtttgtctagcaaccgcccagagactgagggaggtgatgacccgatgggggtcagtgtgggttgtggtggctgaagcgggaccaggggccacctgcctggggcctgggtgccctgggaagcagtgctggttgcactggggggacagctgcctgacgggtgtctccctgtgggctgggtaacgaccgttaccctggttgcagtgcttcctctcttctcctggagttcctgactgtcctctgtggccttgtcctcattgctcttccctgcttcacccactggttccagtccttgtcacctgcaggataaaggttaacatccggacttgacattcaaggcatctccccaggcatccttctccttcttccagaccctgcatgacaagctgccatctcccagggaatgggcaggacacacctgtccacccctgcgtcttggcttttattattccttctacccatattccacctacttctccccaacttttcagacttgatggtttaccccaggtgcaactccgcctccatcatgaatctcctgtcttctgaaatctgcatgtgcgcactgcctggaggtcccttcagtgatgctgctttgggtccccagctgggtggagccacagccacatagagcatctggtgcttagtgggaccccatggagttatctgaaggagtggcagtgcctggatcactgagctggcagatggacatcagggatcatgtggcaatgtccgtctgtctcactcctaacttaaacttcgattttaaaaaatgtggcccagaacattctgatgtcagctggtgttgcatccaaggcccctcaatactggtcccatcccaccttcccagcttcatctcaggcaacatcctcccatccctcagccctttgcctacgctgtcttagaaagccagccactttttctccttcatctccactccagaaaactccctttcatcctgcaagagccagctgaaaactcacctcactacagaagccaattctcacgctgctctgagtggagttagcccctcactcagctgagctttcatctctgttacctgtgactcttctgaccatgttattgtctctctacagtctctctttatgaatgtctgcccctcctgtctcttacctccttttttgagatagggtctcactctgtcacccaggctggagtgcagtggagtgatcatgggtcactgaagagtcgacctctctgggctcaggtgatcctcctacctcagcctctcaagtagctggtactacagatgcatgccacaatgcctggctatattttaaatgtttggtagagagggggtctcagtatgttccccaggctgttcttgaactccagagctcgagcaatcctcctgccttggcctcccaaaatgttgggattataggcgtgagccatgatgcctggcctcttgtctcttctgacatgtagtgggtctttggtctacatttgccaacctcaatatctgtaggtccctagggcagggcctggcgcacagccagggctataggtattaggtatttatttgtggctttcaggaaccgatttttggtgaaagacacttggaaattagccctgcgtttcacagaacacttctattacagcggaaacagtggcagtgcttgtctgcgggtcgccggcatggacagcaggggactgcttccgagggcttatccaaagtcacagcctatcagcaatttttaagataacacattgacatctgtgtgtttaagattctggtaaaaagatgctagaggaagcaatgtgcagacgagagtcggtctgtttgatgtgtgattgaagtgtcagtggagacacacagagaaaaggtgtttggtcaaagatgaagcaccgttttcatgctgaagatctgccctcactcatgggctccaatgtcccttggctagaacctgtccaggcctcagtatggtaccagagggaggcctggatgtggggagaaaggcaggtgcttagctgatacttgcaaaggaaaatttgcaaaaggggctgtaacagagctgtcgctggttgcagcctgactttgaatcttgctctgagcaggaccgtggggacccgagacttctgcagcccctggttgctgtgggctgggccccaaagaccccattcagggaggctgatgcaggggccatgcttgagagatgcccagaacctgccctcccatggttgacggcggtgagggacccactgcctctttccaagccatttattgccacttaccacgagcttggcttacatctgctgctgagagcagagcgatcccaatttggaagccgtggaggccgtttttcacccacactgacataagccatgactctcgaagctgatgacacacttgagataaggtcaaatgctcaacagaaagggacatttgttgcttaatccctgtttgcagagaggctgcagacactaatggctggaggaatatgtggtccttgtccccaggggacctggctggaaggcagggccctctccactccatcgcttggaaactacttaccctactgcacaggatatcagggaagaggcttggaaagcccagcctagagaggggacttagaccctgcttgagggatggggttggggaatgttctcgagacgcaggtgtccaggctggttggtcagtgggctttgggccctggagggggctgtgtgatgagccaggcaccagctgggtgtctgtgtagataggatggtccataggtggagccccttagaggtcttcttcctgcttcccatgtaatctcctgtggctctcagattttgaggtcaggttttgaggctgtaagaggtgctgatttggccaggatataagtactgggagaaacacgaggggaaaagaaaagacaagggtgtgtctataagatttcccgggggagtgagtcagaatgaacggtggcctacttcagtcaacctgagttaagataaagaagaccatggatcgccttggcctgggacctcggtcaaagtatccgtatggatttcctttctgggtcttggtgctgttgagggaggtcatgtgactttgcctaaatcaagttagatctttctacaattatggatactcggtggggttaggcagggggcttggaggcaccctccagaagccttaatgggggcgaccccgctcctccagccattgtgaccactttgtagggtttattgccccagccctcatggtccactggaaggtgggagttccaccccacagagaccacccagcggtggccatgcccggggcttgccatccaggtgcagagccctccacgatcgcctcgtccctcctgtgcttggcagggcttcttcaacttcttcacttgggggaattttccagggcaagccagtgttgtaggtctaaaccctcacggtgttttcttgcatgccaaggctgttgggagaagctgaatgtgctgttatcaagagaccagttctttagaaacaaatgctatgattttcagaattaggatggagtgtaagattccttctttcttggttaatttatagtagccaatgggaagacagagagagattcctttatgggcttcctccactttccaggcttaaaatcatgtgctgggcccttctacatctcattcagacagctggcaatggccatttatgtagggtgagctgaccaactgcagagggctctatttcctggaattctcccctacaaagcaagtgtagccccttcaggaggtgtaaaggcttgacgacctgtgaggaaggagggagtcccatgccccatctctcttgatttaccaggctcctcttaccatgagccagagaacacaagactgagtgtcaggcctgcctgtttcctttccttgggtgtgggacccccctagtgtgagttcacccagtccgcacacgttccacgtgcctccacgaagccaggcctggttctccaatttccaagtagagttctggtttgcgcagcttttctactcaaagggggtatgcggaaggccaaccatgtggttggtgatactcgtgtatagggtacatttggggagaggtttcctgggagggcgagcacttgcatagagggttatcttagtgcccttgaaaaatctagcgaccatagatgggaccttgcctctcctctactctggacacgagacccttgtaaaaaaaaattccctttttgctcaagatacatgctcctcacccatggatttttaaaaaatcttgtccatgcttcacagctcagaaatctcttaacctgttcagtacagatacgactagtaatgatttgtccccaggggctgtattatggtgacactcatcatgggccattctctgcctttctcattcatgagaaagttccagactgggctaagcgaaggccaagaccagaacccttgaaggtactggcccagaaaatgtcctttgggtgaagaagtggtggtgcccttggctcctgaatcctagcagattctttttctagggactccatttctgtcccgcctaatagcatcctgctggcccaagcagatagcagagagctgctgtgggcccctccagctccctatcttccagaagggccacttggctgctgagtgtggcgcagtgacattttccaacttgagctgctaaggtctctagaaaaagatttttccagcagaattagagaggaaagaaggcttgctgtttctgatatgttttacctaagatttctcaaatggctgctgggatcccaactcctcccagggatttccctcctcaaagatatcttggtagatattcaatgggggacctcagaggtgttcaaggaaggactccatctccattgaggcaggtgctgtgcaggggaaggttttactccttcctaagcacttactgttgcctgaatctacttcctaggggttagctgcaggggggttaaggttgtgttgagtagagagaagagaagagaagcctgctaatttgctttttttcctttactttaatctttagttcagctgcccttagtataaactggaacttataaaataaaaaaatgctagggacttctcctctttctctgttaataagctcgcatgctgaaaaaggtctagatgagaagaaaaggaagcccaagtgagagtagcattaaataaaactctttagggtgaggtgggaccagggtggcaggcagctgcaggggagtttcagtgctagaaagtggagttgaactctccaaagggaaaggctggaggggctgaagtgagtacaggctccccagcccctatgctggtccccacttggccatgccaatcttcctagccaggctctttgagagcaaatcccacattctgccggagagctggaaatccagtcttcttgaggtctgaaggtgcttttatgtttccaaatctatcggagcctggagtgtcctctgtagcccttagaaacagtccatggcaaagtcagggatccccactggcagagcaggaggcaggcagccccgtgagcttactggaggattctaatcaagtgactgggaggccggagctcttggcatcaccgccagcccccgcccccatgtttacactcagcccccgttggcaccaatggggatctcaaacccagcctgggaccttgggagcatctattccaatgtcagaataaacagaaatccccacttgagagtgttatgaatcttctcaacacagcactttataaacctcgggggctacgtgcccttgagtgctggcagcattaatatttattcactagggaccaagttttgcctgcagaagcccatgctggtgcctggaaattctcctgtgatcagagccagaggcagagtcccagctcttgcactgcacatacctgggaaggtggttaggagcaggcctggaatccctcccaacacggccaaatcactcactgccactttgtccctgaggaattccaaaacacaataccacaggatgtcttgcccatttctgatcccaggtccaaagggcccaccttctgccccacatctgtcccagtagacttgactttaaactgcttttgctggctggctgcagtggtgcacacctgtaatcccagcactttgggaggccgaggtgggtcgatcatctgaggtcaggagtttgagactggtctgaccaacatcgtgaaaccccatctctactaaatacaaaaaaatagccgggcatggtggtgcatgcctgtaatctcagctacttgggaggctgaggcaagagaatctcttgaagccgggaggcggaggttgcagtgagctgagatcgcaccattgcactccagcctgggcaacaagagtgaaagtctgtctcaaaaaacaaacaaacaaacaatcaaaaaaactgcttttgttcagggtgaactttattcctggcgcttaattgtaaagaatgataaagtccaggatagaccacagagcgatctgagaaagaccaagagaaagagagaaaaaggtaaaggcacacacagaaaaagaaaaacatgctttcaaattcactgacaaacagcatcttccactaaactttcccttgttctgattgtaactcccagccaccccttagctagctgtctttgaattataattgcctctcaaactcctggtactgtaaccttaaaccttgtaattgtgccccaggacaaatcagtactaatttagctaatgcagtacgtcttagacatctctctagcctccactttgaataaggatatcctccccccttcacccccgccaaaaaaagtgtattttaggaccgatgaagcaagtgtgcatggattctaggttgcggttctcggatgtccggagctgggggccagaggagaggggaggtgctcagcttccaggactctgaggggagaagggagtgagtgtctcctctttcacagccctgggaggactctcagccacaccctttcccttgggaattccagtccttcctaggggaggcccagcgctctcatgggtctcctctagaatttgcaggaaaccagtaggaaaccacagatcccctggggcgagggaggtagggacagaaagattgtgcggttgaatctaaaatatgaagggaggttaggagcagccgccaaagggattccattaaggagaccacagaatttagccttatgaagttcatgcccatgtggagacaacgccagggtagccagagaagggttggaagggctgggatgtagaatccgtgccctgcaccaccgcccggcagcaattatctgcggttagctggttactccgagctgccaactcctgaatgccacggcctcccaactgagcctgagacatggcattttctgagccagtcctccttctttctgtgtgatttccattttttctagggtgtctctgttcttagaagtacatcagataactgctcttaagtgagctaaaattaagctcccaaacaaagagttatgagtgctgttttatttctagagatgaaaattgcacgagtaacttatttatttgactacattacattacagtagaaggaaggagaggactgtggtgcaaaacagtaattaactgttttttctctgtcctgaaaattagtgcatagttagatcaaaatatgacagggtgcacgctcatttaattttttaaattgcttggtaacttcaaataaaaccactgctgtggatctgtaggactgtgtgaatgctgaatactcaatggcattttggaaaccacttctgtatgatctgtatggcacaagatgatagcattcattcatttatctggtcagcaaatattaacgacacctactgtgtgaagctgtctctggggagcagtcatgcgcgctggggaattatgtgagtccaagatgctgaggaacaagaacaatcccctgtatcatttattcgtccatccactcattcattcactcaacaaccacttaggcaacttcatttctgtgttgaggttcctgctcacagtttaatgcggtaggatggggttgggggcgggggagaggaaatgagaactaccaggatacatatgagtcactgaggcttgtttgctgatctgatcaaaagaagcacatgcaaagccatccaagaagagggtctgattcattcatttcttcctatgctcactgattaattcactcattccaaagagtttattgaagacctactgtgccctgcagataggatgatgagtgaaatagacttgatccctctctttatggagcttacagtctggagagaggggcagatgttcgtcagagaatcacatgaaccaatgtgaaatcattagtctggcaggtgccttaaggagaggtgtctggagctcacggagcctctggtcctaggctaggggcagcgtcacattctcaggcaggggttacatggaaacatctcagggaagagcgttccaggcagagggaacagcaagtgcacagaccctgtggcagatggaacttggtgaagatgaaggctgaaaggtgggcagagtgaggctagaggcacagaggaaggggaagctgtgagctgagctggagagaaagattgaggcgacgccacagaggccttgatgaaggattttaggctttatctgaaaagcagtgggtaaagccatcatgtaatgtgaatgttgtttaaggggcaatgtgggcagaatggaagcctgggtgtttggtggtgttggacagggcagtggtggaggagatagagagaaagcagatgtgaaacatgtgtgggaagagctgcctttggtccagagatggaagctgaaggagtcagagtctgcagggctagatgggcaggcagagacagtagggaagggcacgtgcagatggaaaaagggcagctctctatcagatcagtgagcaagcctcagtgactcacactggaggccacaagacctgtaacaatgaacacacgggacccccttggatggttccttaattggtggtccaagacttttccttaaacgactttccttttctccttcttgtgttatagaattgctgaaattttctgaagccagtccaacaggtgtgcccacctattgcctacttatccgtgatgaacccttacacattgggt
